(19) United States
(12) Patent Application Publication
(10) Pub. No.: US 2012/0183973 A1
(43) Pub. Date: Jul. 19, 2012

(54) BIOMARKER COMPOSITION FOR DETECTING DIABETIC RETINOPATHY AND DIAGNOSTIC KIT THEREFOR

(75) Inventors: Young-Soo KIM, Seoul (KR); Hyeong-Gon YU, Seoul (KR); Kyung-Gon KIM, Seoul (KR); Sang-Jin KIM, Seoul (KR); Tae-Oh KIM, Yongin-si (KR)

(73) Assignee: SNU R & DB FOUNDATION, Seoul (KR)

(21) Appl. No.: 13/354,016

(22) Filed: Jan. 19, 2012

Related U.S. Application Data
(63) Continuation of application No. 12/733,330, filed on Feb. 24, 2010.

(30) Foreign Application Priority Data
Aug. 30, 2007 (KR) 10-2007-0087512

(51) Int. Cl. G01N 33/573; G01N 33/566

(52) U.S. Cl. 435/7.4; 436/501

(57) ABSTRACT

Provided is a biomarker composition for detecting diabetic retinopathy, comprising at least one protein selected from the group consisting of proteins as set forth in SEQ ID NOS: 1 to 169, a method and a kit for diagnosing diabetic retinopathy using the same. The biomarker can provide fundamental information in researching vitreoretinal disorders, such as, diabetic retinopathy and the protein may be used in a method and a kit for diagnosing diabetic retinopathy with a molecule specifically binding thereto.

### CROSS-REFERENCE TO PRIOR APPLICATIONS

[0001] This is a Continuation Application filed under 35 U.S.C. §120 as a continuation of U.S. patent application Ser. No. 12/733,330, filed on Feb. 24, 2010, which was a National Phase Application filed under 35 U.S.C. §371 as a national stage of PCT/KR2008/005046, filed on Aug. 28, 2008, an application claiming the benefit under 35 U.S.C. §119 of Korean Application No. 10-2007-0087512, filed on Aug. 30, 2007, the content of each of which is hereby incorporated by reference in their entirety.

### TECHNICAL FIELD

[0002] The present invention relates to a biomarker composition for detecting diabetic retinopathy; and a kit for diagnosing diabetic retinopathy. And also, the present invention relates to a biomarker composition for detecting diabetes mellitus; and a kit for diagnosing diabetes mellitus.

### REFERENCE TO THE INCORPORATED SEQUENCE LISTING IN TEXT

[0003] The Sequence Listing submitted in text format (.txt) on Jan. 19, 2012, named “Sequence_Listing.txt”, (created on Thursday, Jan. 19, 2011, 1.19 MB), is incorporated herein by reference.

### BACKGROUND ART

[0004] Diabetes mellitus comprises a group of metabolic disorder characterized by high blood glucose resulting from reduced insulin secretion, decreased glucose utilization, or increased glucose production. Moreover, at least 20 million people have diabetes in the United States [1]. Diabetes can lead to serious vascular complications, which include macrovascular complications like coronary heart disease, cerebrovascular disease, and peripheral vascular disease, and microvascular complications like diabetic retinopathy, nephropathy, and neuropathy.

[0005] Diabetic retinopathy (DR) occurs in three quarters of diabetics with a disease history of more than 15 years [2], and causes 12,000 to 24,000 new cases of blindness each year in the United States, which makes diabetes the leading cause of new cases of blindness among adults (20 to 74 years old) [1]. Pathologic changes in diabetic retinopathy include retinal vascular abnormalities, such as, the impairment of retinal blood flow, increased vascular permeability, breakdown of the blood-retinal barrier, and capillary occlusion resulting in localized hypoxia [3-6]. Moreover, as retinal hypoxia progresses, angiogenic factors are induced that promote retinal neovascularization.

[0006] Proliferative diabetic retinopathy (PDR) concerns new vessels growth into the vitreous cavity, and subsequent fibrovascular proliferation, retinal detachment, and vitreous hemorrhage in PDR, which eventually result in blindness. Although blindness rates have been reduced by panretinal laser photocoagulation and vitrectomy, the visual impairments caused by diabetic retinopathy remain of great concern [7, 8].

[0007] A number of studies have identified factors associated with the pathogenesis of PDR, e.g., angiogenic factors like vascular endothelial growth factor [9-12], angiotensin-converting enzyme [13], insulin-like growth factor [14], angiopoietin [15], erythropoietin [16], placenta growth factor [17], and advanced glycation end product [18], and anti-angiogenic factors like pigment epithelium derived factor [19-21]. However, the majority of previous studies have focused on sets of targeted proteins, particularly on the molecules involved in angiogenesis and cellular proliferation, which makes it difficult to evaluate changes in entire vitreous humor protein profiles and to identify novel markers of PDR pathogenesis.

[0008] Recent advances in two-dimensional gel electrophoresis (2-DE) and mass spectrometry (MS) have allowed the further exploration and acquisition of vitreous protein profiles [22-24]. In our previous study, by using both 2-DE and matrix-assisted laser desorption ionization-time of flight (MALDI-TOF) MS, we constructed PDR vitreous protein profiles and identified eight proteins that are possibly involved in the pathogenesis of PDR [25].

### PRIOR ART REFERENCES

[0009] [Reference 1] CDC, National Diabetes Fact Sheet: General information and National Estimates on Diabetes in the United States. US Department of Health and Human Services, Centers for Disease Control and Prevention, Atlanta, Ga. (2005).
[0010] [Reference 2] Klein, R., Klein, B. E., Moss, S. E., Cruickshanks, K. J., The Wisconsin Epidemiologic Study of Diabetic Retinopathy: XVII. The 14-year incidence and progression of diabetic retinopathy and associated risk factors in type 1 diabetes. Ophthalmology 1998, 105, 1801-1815.
[0011] [Reference 3] Schroder, S., Palinski, W., Schmid-Schonbein, G. W., Activated monocytes and granulocytes, capillary nonperfusion, and neovascularization in diabetic retinopathy. The American journal of pathology 1991, 139, 81-100.
[0012] [Reference 4] Krogsaa, B., Lund-Andersen, H., Mehlsen, J., Sestoft, L., Larsen, J., The blood-retinal barrier permeability in diabetic patients. Acta ophthalmologica 1981, 59, 689-694.
[0013] [Reference 5] Bursell, S. E., Clermont, A. C., Kinsley, B. T., Simonson, D. C., et al., Retinal blood flow changes in patients with insulin-dependent diabetes mellitus and no diabetic retinopathy. Investigative ophthalmology & visual science 1996, 37, 886-897.
[0014] [Reference 6] Gardner, T. W., Antonetti, D. A., Barber, A. J., LaNoue, K. F., Levison, S. W., Diabetic retinopathy: more than meets the eye. Survey of ophthalmology 2002, 47 Suppl 2, S253-262.
[0015] [Reference 7] Ferris, F. L., Davis, M., Early Treatment Diabetic Retinopathy Study Research Group. Early Treatment Diabetic Retinopathy Study Research Group No. 1: Photocoagulation for diabetic macular edema. Early treatment diabetic retinopathy study report no. 1: photocoagulation for diabetic macular edema. Arch. Ophthalmol. 1985, 103, 1796-1806.
[0016] [Reference 8] Lewis, H., Abrams, G. W., Blumenkranz, M. S., Campo, R. V., Vitrectomy for diabetic macular traction and edema associated with posterior hyaloidal traction. Ophthalmology 1992, 99, 753-759.
[0017] [Reference 9] Witmer, A. N., Blaauwgeers, H. G., Weich, H. A., Alitalo, K., et al., Altered expression patterns of VEGF receptors in human diabetic retina and in experimental VEGF-induced retinopathy in monkey. Investigative ophthalmology & visual science 2002, 43, 849-857.
[0018] [Reference 10] Pe'er, J., Folberg, R., Itin, A., Gnessin, H., et al., Upregulated expression of vascular endothelial growth factor in proliferative diabetic retinopathy. The British journal of ophthalmology 1996, 80, 241-245.
[0019] [Reference 11] Mathews, M. K., Merges, C., McLeod, D. S., Lutty, G. A., Vascular endothelial growth factor and vascular permeability changes in human diabetic retinopathy. Investigative ophthalmology & visual science 1997, 38, 2729-2741.
[0020] [Reference 12] Witmer, A. N., Vrensen, G. F., Van Noorden, C. J., Schlingemann, R. O., Vascular endothelial growth factors and angiogenesis in eye disease. Progress in retinal and eye research 2003, 22, 1-29.
[0021] [Reference 13] Kida, T., Ikeda, T., Nishimura, M., Sugiyama, T., et al., Renin-angiotensin system in proliferative diabetic retinopathy and its gene expression in cultured human muller cells. Japanese journal of ophthalmology 2003, 47, 36-41.
[0022] [Reference 14] Guidry, C., Feist, R., Morris, R., Hardwick, C. W., Changes in IGF activities in human diabetic vitreous. Diabetes 2004, 53, 2428-2435.
[0023] [Reference 15] Ohashi, H., Takagi, H., Koyama, S., Oh, H., et al., Alterations in expression of angiopoietins and the Tie-2 receptor in the retina of streptozotocin induced diabetic rats. Molecular vision 2004, 10, 608-617.
[0024] [Reference 16] Watanabe, D., K., S., Erythropoietin as a retinal angiogenic factor in proliferative diabetic retinopathy. The New England journal of medicine 2005, 353, 782-792.
[0025] [Reference 17] Mitamura, Y., Tashimo, A., Nakamura, Y., Tagawa, H., et al., Vitreous levels of placenta growth factor and vascular endothelial growth factor in patients with proliferative diabetic retinopathy. Diabetes care 2002, 25, 2352.
[0026] [Reference 18] Matsumoto, Y., Takahashi, M., Chikuda, M., Arai, K., Levels of mature cross-links and advanced glycation end product cross-links in human vitreous. Japanese journal of ophthalmology 2002, 46, 510-517.
[0027] [Reference 19] Dawson, D. W., Volpert, O. V., Gillis, P., Crawford, S. E., et al., Pigment epithelium-derived factor: a potent inhibitor of angiogenesis. Science (New York, N.Y. 1999, 285, 245-248.
[0028] [Reference 20] Duh, E. J., Yang, H. S., Suzuma, I., Miyagi, M., et al., Pigment epithelium-derived factor suppresses ischemia-induced retinal neovascularization and VEGF-induced migration and growth. Investigative ophthalmology & visual science 2002, 43, 821-829.
[0029] [Reference 21] Spranger, J., Osterhoff, M., Reimann, M., Mohlig, M., et al., Loss of the antiangiogenic pigment epithelium-derived factor in patients with angiogenic eye disease. Diabetes 2001, 50, 2641-2645.
[0030] [Reference 22] Nakanishi, T., Koyama, R., Ikeda, T., Shimizu, A., Catalogue of soluble proteins in the human vitreous humor: comparison between diabetic retinopathy and macular hole. Journal of chromatography 2002, 776, 89-100.
[0031] [Reference 23] Ouchi, M., West, K., Crabb, J. W., Kinoshita, S., Kamei, M., Proteomic analysis of vitreous from diabetic macular edema. Experimental eye research 2005, 81, 176-182.
[0032] [Reference 24] Yamane, K., Minamoto, A., Yamashita, H., Takamura, H., et al., Proteome analysis of human vitreous proteins. Mol Cell Proteomics 2003, 2, 1177-1187.
[0033] [Reference 25] Kim, S. J., Kim, S., Park, J., Lee, H. K., et al., Differential expression of vitreous proteins in proliferative diabetic retinopathy. Current eye research 2006, 31, 231-240.

### DETAILED DESCRIPTION OF THE INVENTION

### Technical Problem

[0034] In order to identify biomarkers capable of detecting PDR, the present inventors conducted extensive search on entire proteins involved in the pathogenesis of PDR, including low abundance proteins. As a result, 531 proteins were identified in the vitreous proteome and 240 proteins among them were newly identified. Among the newly identified 240 vitreous proteins, it was found that 105 proteins were significantly over-expressed in the vitreous humors obtained from PDR patients, while 64 proteins were significantly over-expressed in those obtained from normal people. And also, it has been found that the levels of thyroxine-binding globulin precursor (TBG) in both vitreous and plasma of PDR and NPDR states and in plasma of diabetes mellitus (DM) state, are outstandingly higher than in non-diabetic control (MH or normal control), which means that TBG can function as is a diabetes mellitus (DM) biomarker.

[0035] Thus, the present invention provides a biomarker composition for detecting diabetic retinopathy comprising one or more protein(s) among the differently expressed 169 proteins in the vitreous humors derived from PDR patients and normal people, respectively.

[0036] The present invention also provides a biomarker composition for detecting diabetes mellitus comprising thyroxine-binding globulin precursor, i.e., the protein as set forth in SEQ ID NO: 69.

[0037] The present invention also provides a kit for diagnosing diabetic retinopathy, comprising a molecule specifically binding to the protein(s).

[0038] The present invention also provides a kit for diagnosing diabetic mellitus, comprising a molecule specifically binding to thyroxine-binding globulin precursor, i.e., the protein as set forth in SEQ ID NO: 69.

### Technical Solution

[0039] According to an aspect of the present invention, there is provided a biomarker composition for detecting diabetic retinopathy comprising at least one protein selected from the group consisting of proteins as set forth in SEQ ID NOS: 1 to 169.

[0040] In the biomarker composition of the present invention, the at least one protein may be selected from the group consisting of proteins as set forth in SEQ ID NOS: 4, 5, 8, 15, 19, 27, 30, 32, 33, 36, 38, 39, 40, 41, 42, 45, 46, 47, 48, 49, 51, 52, 53, 55, 56, 59, 60, 62, 66, 67, 68, 69, 71, 74, 78, 83, 86, 88, 89, 91, 95, 96, 97, 98, 99, 100, and 105. And, the at least one protein may be selected from the group consisting of proteins as set forth in SEQ ID NOS: 109, 111, 117, 122, 123, 124, 125, 126, 127, 129, 131, 132, 136, 137, 138, 146, 147, 149, 152, 158, 159, 161, 165, and 167. Preferably, the at least one protein may be a protein as set forth in SEQ ID NOS: 48 or 69. And also, blood or urine may be used as a test sample.

[0041] According to another aspect of the present invention, there is provided a biomarker composition for detecting diabetes mellitus comprising the protein as set forth in SEQ ID NO: 69. In the biomarker composition, blood or urine may be used as a test sample.

[0042] According to still another aspect of the present invention, there is provided a kit for diagnosing diabetic retinopathy, comprising a molecule specifically binding to at least one protein selected from the group consisting of proteins as set forth in SEQ ID NOS: 1 to 169.

[0043] The molecule may be a monoclonal antibody, a polyclonal antibody, substrate, ligand, or cofactor. The at least one protein may be selected from the group consisting of proteins as set forth in SEQ ID NOS: 4, 5, 8, 15, 19, 27, 30, 32, 33, 36, 38, 39, 40, 41, 42, is 45, 46, 47, 48, 49, 51, 52, 53, 55, 56, 59, 60, 62, 66, 67, 68, 69, 71, 74, 78, 83, 86, 88, 89, 91, 95, 96, 97, 98, 99, 100, and 105. And, the at least one protein may be selected from the group consisting of proteins as set forth in SEQ ID NOS: 109, 111, 117, 122, 123, 124, 125, 126, 127, 129, 131, 132, 136, 137, 138, 146, 147, 149, 152, 158, 159, 161, 165, and 167. Preferably, the at least one protein may be a protein as set forth in SEQ ID NOS: 48 or 69. And also, in the kit of the present invention, blood or urine may be used as a test sample.

[0044] According to still another aspect of the present invention, there is provided a kit for diagnosing diabetes mellitus, comprising a molecule specifically binding to the protein as set forth in SEQ ID NO: 69. The molecule may be a monoclonal antibody, a polyclonal antibody, substrate, ligand, or cofactor; and blood or urine may be used as a test sample.

### ADVANTAGEOUS EFFECTS

[0045] By the present invention, it has been newly found that 105 proteins as set forth in SEQ ID NOS: 1 to 105 are significantly over-expressed in the vitreous humors obtained from PDR patients, while 64 proteins as set forth in SEQ ID NOS: 106 to 169 are significantly over-expressed in those obtained from normal people. Therefore, the proteins can be used for biomarker capable of detecting diabetic retinopathy. The biomarker can provide fundamental information in researching vitreoretinal disorders, such as diabetic retinopathy. Especially, the newly found proteins may be applied to a kit for diagnosing diabetic retinopathy with a molecule specifically binding thereto, e.g., a monoclonal antibody. And also, it has been newly found that the levels of thyroxine-binding globulin precursor (TBG) in both vitreous and plasma of PDR and NPDR states and in plasma of diabetes mellitus (DM) state, are outstandingly higher than in non-diabetic control (MH or normal control). Therefore, TBG may be applied to a kit for diagnosing diabetes mellitus with a molecule specifically binding thereto.

### BRIEF DESCRIPTION OF THE DRAWINGS

[0046] FIG. 1 shows scheme of the 2-DE/MALDI-MS, LC-MALDI-MS/MS, and LC-ESI-MS/MS experiments.

[0047] FIG. 2 shows Venn diagram of identified PDR proteins by 2-DE.

[0048] FIGS. 3 to 5 show process used to identify proteins by SDS-PAGE and LC-MALDI-MS/MS. Non-depleted PDR, albumin/IgG depleted PDR and control vitreous samples were separated by SDS-PAGE and their respective proteins were identified by LC-MALDI-MS/MS. In FIG. 3, 500 μg of non-depleted PDR vitreous was loaded on SDS-PAGE gel and sliced into 16 pieces. Each piece was chopped into fragments for in-gel digestion. In FIG. 4, in-gel digested tryptic peptides were injected into a nano LC system for fractionation. This LC chromatogram represents elution time (horizontal) versus peak intensity (vertical). LC chromatogram was generated according to the acetonitrile gradient over 60 min. In FIG. 5, spotted fractionated peptides on a 144 well MALDI-target plate were analyzed using a MALDI-TOF/TOF tandem spectrometer and the spectra of the 144 spots in the 9th SDS-PAGE gel slice were visualized using the peak explorer module of GPS explorer v3.5 (Matrix Science, Boston Mass.). The chart represents m/z (vertical) versus MALDI-target plate number (horizontal).

[0049] FIG. 6 shows MS/MS spectrum for the peptide LAAAVSNGFYDLYR (SEQ ID NO: 170), which originated from pigment epithelium-derived factor (PEDF), a representative protein in the 9th fraction of the SDS-PAGE gel. The chart represents m/z (horizontal) versus % intensity (vertical). The spectrums for the tryptic peptides of PEDF were annotated using GPS explorer software v3.5 and the MASCOT search engine v1.9 against IPI human database v3.24.

[0050] FIG. 7 shows Venn diagram of proteins identified by LC-MALDI-MS/MS and LC-ESI-MS/MS.

[0051] FIG. 8 shows subcategories under “biological process” of the GO annotation for three vitreous samples.

[0052] FIG. 9 shows the numbers of peptides for each PDR specific protein group. The larger the peptide number is, the easier to find the MRM transition.

[0053] FIG. 10 shows age distribution of the sample according to sex.

[0054] FIG. 11 shows the interactive plot and ROC curve of TBG, which is for MH (non-diabetic control) versus PDR in vitreous set.

[0055] FIG. 12 shows the interactive plots and the ROC curves of TBG for MH (non-diabetic control) versus NPDR vitreous set.

[0056] FIG. 13 shows the interactive plots of TBG for MH versus PDR in plasma sample set.

[0057] FIG. 14 shows the interactive plots and ROC curve of TBG for MH versus NPDR in plasma sample set.

[0058] FIGS. 15 and 16 show the levels of thyroxine-binding globulin precursor (TBG) of PDR and NPDR states in both vitreous (FIG. 15) and plasma (FIG. 16).

### BEST MODE FOR CARRYING OUT THE INVENTION

[0059] The present invention includes a biomarker composition for detecting diabetic retinopathy comprising at least one protein selected from the group consisting of proteins as set forth in SEQ ID NOS: 1 to 169.

[0060] The present inventors used several proteomic methods to identify components of the vitreous proteome, i.e., IS/2-DE/MALDI-MS, nano LC-MALDI-MS/MS, and nano LC-ESI-MS/MS. Proteins identified by nano LC-MALDI-MS/MS and nano LC-ESI-MS/MS were validated using the Trans-Proteomic Pipeline, in which isoforms and homologous proteins are grouped into representative orthologues. The present inventors also conducted LC-MS/MS analyses on albumin/IgG depleted PDR samples, non-albumin/IgG depleted PDR samples, and macular hole (MH) vitreous samples to conduct search of entire proteins involved in the pathogenesis of PDR, thereby identifying 531 proteins. As a result of database search on the 531 proteins, it was newly found that 240 proteins are involved in the PDR pathogenesis. Among them, it was found that 105 proteins described in Table 1 to 4 were significantly over-expressed in the vitreous humors obtained from PDR patients, while 64 proteins described in Table 5 to 6 were significantly over-expressed in those obtained from normal people.

TABLE 1

| | Detected | | | |
|---|---|---|---|---|
| | in | | IPI | |
| SEQ | plasma | | accession | Re- |
| ID | proteome | Protein name | number | marks |
| 1 | | 101 KDA PROTEIN | IPI00760855 | A |
| 2 | | 13 kDa protein | IPI00743473 | A |
| 3 | | 14-3-3 protein epsilon | IPI00000816 | A |
| 4 | * | 16 kDa protein | IPI00218733 | A |
| 5 | * | 184 KDA PROTEIN | IPI00303313 | A |
| 6 | | 57 kDa protein | IPI00383111 | A |
| 7 | | 97 KDA PROTEIN | IPI00794184 | A |
| 8 | * | Adiponectin precursor | IPI00020019 | A |
| 9 | | ADP-ribosylation factor 1 | IPI00215914 | A |
| 10 | | ALPHA3A | IPI00377045 | A |
| 11 | | ANNEXIN A2 ISOFORM 1 | IPI00418169 | A |
| 12 | | Beta-hexosaminidase | IPI00012585 | A |
| | | beta chain precursor | | |
| 13 | | Biglycan precursor | IPI00010790 | A |
| 14 | | Calcium/calmodulin- | IPI00005592 | A |
| | | dependent 3′,5′-cyclic | | |
| | | nucleotide phosphodiesterase 1B | | |
| 15 | * | CALMODULIN-LIKE PROTEIN 5 | IPI00021536 | A |
| 16 | | CD59 glycoprotein precursor | IPI00011302 | A |
| 17 | | CDNA FLJ25678 fis, clone | IPI00017672 | A |
| | | TST04067, highly | | |
| | | similar to PURINE NUCLEOSIDE | | |
| | | PHOSPHORYLASE | | |
| 18 | | CDNA FLJ41981 fis, clone | IPI00784830 | A |
| | | SMINT2011888, highly similar to | | |
| | | Protein Tro alphal H,myeloma | | |
| 19 | * | Cholinesterase precursor | IPI00025864 | A |
| 20 | | Cofilin-1 | IPI00012011 | A |
| 21 | | Corneodesmosin precursor | IPI00386809 | A |
| 22 | | Dermatopontin precursor | IPI00292130 | A |
| 23 | | E3 UBIQUITIN-PROTEIN | IPI00328911 | A |
| | | LIGASE HECTD1 | | |
| 24 | | Endothelial protein C | IPI00009276 | A |
| | | receptor precursor | | |
| 25 | | FERRITIN HEAVY CHAIN | IPI00554521 | A |
| 26 | | FERRITIN LIGHT | IPI00796538 | A |
| | | POLYPEPTIDE VARIANT | | |
| 27 | * | Fetuin-B precursor | IPI00005439 | A |
| 28 | | FIBRONECTIN 1 ISOFORM 4 | IPI00414283 | A |
| | | PREPROPROTEIN | | |
| 29 | | Fructose-bisphosphate aldolase C | IPI00418262 | A |
| 30 | * | Gamma-glutamyl hydrolase | IPI00023728 | A |
| | | precursor | | |

TABLE 2

| | Detected in | | | |
|---|---|---|---|---|
| SEQ | plasma | | IPI accession | |
| ID | proteome | Protein name | number | Remarks |
| 31 | | Gastrokine-1 precursor | IPI00021342 | A |
| 32 | * | Growth/differentiation factor 8 precursor | IPI00023751 | A |
| 33 | * | Hepatocyte growth factor activator precursor | IPI00029193 | A |
| 34 | | Hornerin | IPI00398625 | A |
| 35 | | Hypoxanthine-guanine phosphoribosyltransferase | IPI00218493 | A |
| 36 | * | Intercellular adhesion molecule 2 precursor | IPI00009477 | A |
| 37 | | Isoform 1 of Arginase-1 | IPI00291560 | A |
| 38 | * | Isoform 1 of Contactin-4 precursor | IPI00178854 | A |
| 39 | * | Isoform 1 of C-reactive protein precursor | IPI00022389 | A |
| 40 | * | Isoform 1 of Ficolin-3 precursor | IPI00293925 | A |
| 41 | * | Isoform 1 of Mannan-binding lectin serine | IPI00294713 | A |
| | | protease 2 precursor | | |
| 42 | * | Isoform 1 of Multiple epidermal growth factor-like domains 8 | IPI00027310 | A |
| 43 | | Isoform 1 of Phosphatidylinositol-glycan- | IPI00299503 | A |
| | | specific phospholipase D precursor | | |
| 44 | | ISOFORM 1 OF PHOSPHOLIPID TRANSFER | IPI00643034 | A |
| | | PROTEIN PRECURSOR | | |
| 45 | * | Isoform 1 of Plexin domain-containing protein 2 precursor | IPI00044369 | A |
| 46 | * | Isoform 1 of Probable helicase senataxin | IPI00142538 | A |
| 47 | * | Isoform A of Proteoglycan-4 precursor | IPI00024825 | A |
| 48 | * | Kallistatin precursor | IPI00328609 | A |
| 49 | * | Lipopolysaccharide-binding protein precursor | IPI00032311 | A |
| 50 | | Lithostathine 1 alpha precursor | IPI00009027 | A |
| 51 | * | Macrophage colony-stimulating factor 1 receptor precursor | IPI00011218 | A |
| 52 | * | MANIA1 PROTEIN | IPI00291641 | A |
| 53 | * | MIMECAN PRECURSOR | IPI00025465 | A |
| 54 | | MUCIN-5B PRECURSOR | IPI00384897 | A |
| 55 | * | Multimerin-2 precursor | IPI00015525 | A |
| 56 | * | Myocilin precursor | IPI00019190 | A |
| 57 | | Myoglobin | IPI00217493 | A |
| 58 | | Neurexin 3-alpha | IPI00216728 | A |
| 59 | * | Nidogen-2 precursor | IPI00028908 | A |
| 60 | * | PEPTIDYL-PROLYL CIS-TRANS ISOMERASE C | IPI00024129 | A |

TABLE 3

| | Detected in | | | |
|---|---|---|---|---|
| | plasma | | IPI accession | |
| SEQ ID | proteome | Protein name | number | Remarks |
| 61 | | Phosphatidylethanolamine-binding protein 1 | IPI00219446 | A |
| 62 | * | Pregnancy zone protein precursor | IPI00025426 | A |
| 63 | | Protein DJ-1 | IPI00298547 | A |
| 64 | | Pseudogene candidate | IPI00454869 | A |
| 65 | | Rho GDP-dissociation inhibitor 2 | IPI00003817 | A |
| 66 | * | Serpin B4 | IPI00010303 | A |
| 67 | * | SUPEROXIDE DISMUTASE [MN], | IPI00022314 | A |
| | | MITOCHONDRIAL PRECURSOR | | |
| 68 | * | Thioredoxin | IPI00216298 | A |
| 69 | * | Thyroxine-binding globulin precursor | IPI00292946 | A |
| 70 | | TRIOSEPHOSPHATE ISOMERASE 1 VARIANT | IPI00465028 | A |
| 71 | * | UNCHARACTERIZED PROTEIN C7ORF24 | IPI00031564 | A |
| 72 | | V1-17 protein | IPI00045547 | A |
| 73 | | V1-5 protein (Fragment) | IPI00553215 | A |
| 74 | * | von Willebrand factor precursor | IPI00023014 | A |
| 75 | | WSB-1 ISOFORM | IPI00383777 | A |
| 76 | | 10 kDa protein | IPI00740756 | C |
| 77 | | 25 kDa protein | IPI00448800 | C |
| 78 | * | 272 KDA PROTEIN | IPI00219299 | C |
| 79 | | 330 kDa protein | IPI00163866 | C |
| 80 | | 3′-5′ exoribonuclease CSL4 homolog | IPI00032823 | C |
| 81 | | ACF7 PROTEIN | IPI00183169 | C |
| 82 | | Actin, aortic smooth muscle | IPI00008603 | C |
| 83 | * | ATP-binding cassette, sub-family A, member 2 isoform a | IPI00307592 | C |
| 84 | | BONE MORPHOGENETIC PROTEIN | IPI00005731 | C |
| | | RECEPTOR TYPE IA PRECURSOR | | |
| 85 | | CDNA: FLJ21459 fis, clone COL04714 | IPI00001606 | C |
| 86 | * | CENTROMERE PROTEIN F | IPI00027157 | C |
| 87 | | CRYPTOCHROME-1 | IPI00002540 | C |
| 88 | * | Dpy-19-like protein 1 | IPI00007461 | C |
| 89 | * | EXOCYST COMPLEX COMPONENT 8 | IPI00028264 | C |
| 90 | | ISOFORM 1 OF ALANINE | IPI00152432 | C |
| | | AMINOTRANSFERASE 2 | | |

TABLE 4

| | Detected in | | | |
|---|---|---|---|---|
| | plasma | | IPI accession | |
| SEQ ID | proteome | Protein name | number | Remarks |
| 91 | * | ISOFORM 1 OF GRIP AND COILED-COIL | IPI00005631 | C |
| | | DOMAIN-CONTAINING PROTEIN 2 | | |
| 92 | | ISOFORM 1 OF PROBABLE E3 UBIQUITIN- | IPI00333067 | C |
| | | PROTEIN LIGASE HERC4 | | |
| 93 | | ISOFORM 1 OF | IPI00069084 | C |
| | | TRANSFORMATION/TRANSCRIPTION | | |
| | | DOMAIN-ASSOCIATED PROTEIN | | |
| 94 | | Isoform 1 of Uncharacterized protein C9orf84 | IPI00658203 | C |
| 95 | * | ISOFORM 2 OF CROSSOVER JUNCTION | IPI00073193 | C |
| | | ENDONUCLEASE EME1 | | |
| 96 | * | ISOFORM 4 OF NESPRIN-1 | IPI00247295 | C |
| 97 | * | Junctional adhesion molecule A precursor | IPI00001754 | C |
| 98 | * | Mucin 5 (Fragment) | IPI00103397 | C |
| 99 | * | POTASSIUM/SODIUM HYPERPOLARIZATION | IPI00031506 | C |
| | | ACTIVATED CYCLIC NUCLEOTIDE-GATED | | |
| | | CHANNEL 1 | | |
| 100 | * | PROTEIN BASSOON | IPI00020153 | C |
| 101 | | SIMILAR TO GENERAL TRANSCRIPTION | IPI00736974 | C |
| | | FACTOR II-I REPEAT DOMAIN-CONTAINING | | |
| | | PROTEIN 1 (GTF2I REPEAT DOMAIN- | | |
| | | CONTAINING PROTEIN 1) (MUSCLE TFII-I | | |
| | | REPEAT DOMAIN-CONTAINING PROTEIN 1) | | |
| | | (GENERAL TRANSCRIPTION FACTOR III) | | |
| | | (SLOW-MUSCLE-FIBER ENHANCER BINDING PRO | | |
| 102 | | Structural maintenance of chromosomes protein 1B | IPI00479260 | C |
| 103 | | Thyroid hormone receptor-associated protein 2 | IPI00400834 | C |
| 104 | | UNCHARACTERIZED PROTEIN C22ORF30 | IPI00643747 | C |
| 105 | * | Utrophin | IPI00009329 | C |

TABLE 5

| | Detected | | | |
|---|---|---|---|---|
| | in | | | |
| | plasma | | IPI accession | |
| SEQ ID | proteome | Protein name | number | Remarks |
| 106 | | 106 kDa protein | IPI00293088 | G |
| 107 | | 12 kDa protein | IPI00478441 | G |
| 108 | | 261 KDA PROTEIN | IPI00791343 | G |
| 109 | * | 31 KDA PROTEIN | IPI00166417 | G |
| 110 | | 53 kDa protein | IPI00020430 | G |
| 111 | * | 72 kDa type IV collagenase precursor | IPI00027780 | G |
| 112 | | Agrin precursor | IPI00374563 | G |
| 113 | | Alcadein beta | IPI00396423 | G |
| 114 | | Alpha-mannosidase 2 | IPI00003802 | G |
| 115 | | Alpha-N-acetylgalactosaminidase precursor | IPI00414909 | G |
| 116 | | Beta-1,3-N-acetylglucosaminyltransferase radical | IPI00001793 | G |
| | | fringe | | |
| 117 | * | Caspase-14 precursor | IPI00013885 | G |
| 118 | | CDNA FLJ45402 fis, clone BRHIP3029409, | IPI00384783 | G |
| | | moderately similar to Homo sapiens secreted | | |
| | | frizzled-related protein 1 | | |
| 119 | | Chromogranin A precursor | IPI00290315 | G |
| 120 | | Deoxyribonuclease-2-alpha precursor | IPI00010348 | G |
| 121 | | DIS3 MITOTIC CONTROL HOMOLOG (S. | IPI00291003 | G |
| | | CEREVISIAE)-LIKE | | |
| 122 | * | EXTL2 protein (Fragment) | IPI00002732 | G |
| 123 | * | Extracellular matrix protein 1 precursor | IPI00003351 | G |
| 124 | * | Full-length cDNA clone CSODLOO4YM19 of B | IPI00328493 | G |
| | | cells (Ramos cell line) of Homo sapiens (Fragment) | | |
| 125 | * | Glucosidase 2 subunit beta precursor | IPI00026154 | G |
| 126 | * | Glutaminyl-peptide cyclotransferase precursor | IPI00003919 | G |
| 127 | * | Histatin-1 precursor | IPI00012024 | G |
| 128 | | Histone H4 | IPI00453473 | G |
| 129 | * | Isoform 1 of Contactin-associated protein-like 2 precursor | IPI00029343 | G |
| 130 | | Isoform 1 of Follistatin-related protein 4 precursor | IPI00477747 | G |
| 131 | * | Isoform 1 of L-lactate dehydrogenase A chain | IPI00217966 | G |
| 132 | * | Isoform 1 of Neogenin precursor | IPI00023814 | G |
| 133 | | Isoform 1 of Neural cell adhesion molecule L1 precursor | IPI00027087 | G |
| 134 | | Isoform 1 of Neurexin-2-alpha precursor | IPI00007921 | G |
| 135 | | Isoform 1 of Peptidyl-glycine alpha-amidating | IPI00177543 | G |
| | | monooxygenase precursor | | |

TABLE 6

| | Detected in | | | |
|---|---|---|---|---|
| | plasma | | IPI accession | |
| SEQ ID | proteome | Protein name | number | Remarks |
| 136 | * | Isoform 1 of Receptor-type tyrosine-protein | IPI00011642 | G |
| | | phosphatase delta precursor | | |
| 137 | * | Isoform 1 of Sulfhydryl oxidase 1 precursor | IPI00003590 | G |
| 138 | * | Isoform 1 of Tenascin-R precursor | IPI00160552 | G |
| 139 | | Isoform 2 of Neurexin-3-alpha precursor | IPI00441515 | G |
| 140 | | Isoform 2 of Phospholipid transfer protein precursor | IPI00217778 | G |
| 141 | | Isoform 2 of Testican-3 precursor | IPI00419590 | G |
| 142 | | Isoform 2 of Triosephosphate isomerase | IPI00451401 | G |
| 143 | | Isoform 4 of Seizure 6-like protein precursor | IPI00157417 | G |
| 144 | | Isoform Long of Alpha-mannosidase IIx | IPI00027703 | G |
| 145 | | Isoform Long of Iduronate 2-sulfatase precursor | IPI00026104 | G |
| 146 | * | Isoform Sap-mu-0 of Proactivator polypeptide precursor | IPI00012503 | G |
| 147 | * | ISOFORM XB OF TENASCIN-X PRECURSOR | IPI00025276 | G |
| 148 | | Laminin subunit beta-2 precursor | IPI00296922 | G |
| 149 | * | Laminin subunit gamma-1 precursor | IPI00298281 | G |
| 150 | | Latent-transforming growth factor beta-binding | IPI00292150 | G |
| | | protein 2 precursor | | |
| 151 | | Legumain precursor | IPI00293303 | G |
| 152 | * | L-lactate dehydrogenase B chain | IPI00219217 | G |
| 153 | | Lysosomal protective protein precursor | IPI00021794 | G |
| 154 | | Malate dehydrogenase, cytoplasmic | IPI00291005 | G |
| 155 | | N-acetylglucosamine-6-sulfatase precursor | IPI00012102 | G |
| 156 | | Neurocan core protein precursor | IPI00159927 | G |
| 157 | | Neuronal pentraxin-2 precursor | IPI00026946 | G |
| 158 | * | Oligodendrocyte-myelin glycoprotein precursor | IPI00295832 | G |
| 159 | * | Protein S100-A9 | IPI00027462 | G |
| 160 | | retbindin | IPI00027765 | G |
| 161 | * | Retinoic acid receptor responder protein 2 precursor | IPI00019176 | G |
| 162 | | Secreted frizzled-related protein 2 precursor | IPI00027596 | G |
| 163 | | Secreted frizzled-related protein 3 precursor | IPI00294650 | G |
| 164 | | similar to 60S ribosomal protein L23a | IPI00001310 | G |
| 165 | * | TBC1 domain family member 1 | IPI00164610 | G |
| 166 | | Testican-1 precursor | IPI00005292 | G |
| 167 | * | transmembrane protein 132A isoform b | IPI00301865 | G |
| 168 | | Two-pore calcium channel protein 2 | IPI00169371 | G |
| 169 | | V2-7 PROTEIN | IPI00747752 | G |

*: Detected in plasma proteome
Remark :
A-Expressed only in albumin/IgG depleted-PDR
B-Expressed in both albumin/IgG depleted-PDR and non-albumin/IgG depleted-PDR
C-Expressed only in non-albumin/IgG depleted-PDR
G-Expressed only in control vitreous humor.

[0061] As used herein, the term “at least one protein selected from the group consisting of proteins as set forth in SEQ ID NOS: 1 to 169” refers to protein(s) having one or more amino acid sequence(s) selected among the amino acid sequences as set forth in SEQ ID NOS: 1 to 169. It should be noted that the term “protein(s)”, as used herein, includes both each amino acid sequence of SEQ ID NOS: 1 to 169 and its fragments.

[0062] The biomarker composition of the present invention may be used for detecting proteins as set forth in SEQ ID NOS: 1 to 169 in a test sample, e.g., human tissue or humor. Especially, when human blood or urine is used as a test sample, potential ethical problems can be avoided. Thus, preferably, the biomarker composition of the present invention comprises protein(s) specifically over-expressed in the plasma as well as the vitreous humor. That is, preferably, the biomarker composition for detecting PDR of the present invention comprises protein(s) specifically over-expressed in the plasma, i.e., at least one protein selected from the group consisting of proteins as set forth in SEQ ID NOS: 4, 5, 8, 15, 19, 27, 30, 32, 33, 36, 38, 39, 40, 41, 42, 45, 46, 47, 48, 49, 51, 52, 53, 55, 56, 59, 60, 62, 66, 67, 68, 69, 71, 74, 78, 83, 86, 88, 89, 91, 95, 96, 97, 98, 99, 100, and 105; or at least one protein selected from the group consisting of proteins as set forth in SEQ ID NOS: 109, 111, 117, 122, 123, 124, 125, 126, 127, 129, 131, 132, 136, 137, 138, 146, 147, 149, 152, 158, 159, 161, 165, and 167. Preferably, the at least one protein is a protein as set forth in SEQ ID NOS: 48 or 69.

[0063] In the biomarker composition of the present invention, detection of the biomarker may be carried out by directly detecting the presence of a biomarker protein through two-dimensional gel electrophoresis (2-DE) on a test sample, e.g., human tissue or humor; or by indirectly identifying the presence of a biomarker protein through immunoassay methods using antigen-antibody reaction after contacting a test sample, e.g., human tissue or humor, with an antibody. The immunoassay methods include enzyme-linked immunoassay (ELISA, coated tube), immunomagnetic assay using antibody-linked magnetic beads, latex-bead assay method using antibody-linked latex beads.

[0064] And also, it has been found that the levels of thyroxine-binding globulin precursor (TBG) in both vitreous and plasma of PDR and NPDR states and in plasma of diabetes mellitus (DM) state, are outstandingly higher than in non-diabetic control (MH or normal control), which means that TBG can function as a diabetes mellitus (DM) biomarker. Therefore, the present invention includes a biomarker composition for detecting diabetes mellitus comprising the protein as set forth in SEQ ID NO: 69. In the biomarker composition, blood or urine may be used as a test sample.

[0065] The present invention includes a kit for diagnosing diabetic retinopathy, comprising a molecule specifically binding to at least one protein selected from the group consisting of proteins as set forth in SEQ ID NOS: 1 to 169.

[0066] The molecules may be a monoclonal antibody, a polyclonal antibody, substrate, ligand, or cofactor, which specifically binds to the at least one protein, preferably a monoclonal antibody or a polyclonal antibody, more preferably a monoclonal antibody.

[0067] Polyclonal or monoclonal antibodies may be prepared by a method commonly known is in the biotechnology field, e.g., hybridoma methods, such as those described by Kohler and Milstein, Nature, 256:495 (1975), and improvements thereto. For example, a mouse is immunized with a protein selected from the proteins having amino acid sequences as set forth in SEQ ID NOS: 1 to 169 or its fragment; or immunized with a synthetic peptide thereof bound to bovine serum albumin. Antigen-producing B lymphocytes isolated from the mouse are fused with human or mouse myeloma to produce immortalized hybridoma cell lines. The production of monoclonal antibodies is confirmed, e.g., through indirect ELISA methods, and then positive clones are selected. The positive clones are cultured and purified to obtain monoclonal antibodies, or alternatively, monoclonal antibodies are obtained by injecting the positive clones into mouse abdominal cavity and then taking the ascites.

[0068] As mentioned above, when human blood or urine is used as a test sample, potential ethical problems can be avoided. Thus, preferably, the kit of the present invention comprises a molecule specifically binding to at least one protein specifically over-expressed in the plasma as well as the vitreous humor, which may be selected from the group consisting of proteins as set forth in SEQ ID NOS: 4, 5, 8, 15, 19, 27, 30, 32, 33, 36, 38, 39, 40, 41, 42, 45, 46, 47, 48, 49, 51, 52, 53, 55, 56, 59, 60, 62, 66, 67, 68, 69, 71, 74, 78, 83, 86, 88, 89, 91, 95, 96, 97, 98, 99, 100, and 105; or selected from the group consisting of proteins as set forth in SEQ ID NOS: 109, 111, 117, 122, 123, 124, 125, 126, 127, 129, 131, 132, 136, 137, 138, 146, 147, 149, 152, 158, 159, 161, 165, and 167. Preferably, the at least one protein is a protein as set forth in SEQ ID NOS: 48 or 69.

[0069] And also, in the kit of the present invention, blood or urine may be preferably used as a test sample.

[0070] As mentioned above, it has been found that the levels of thyroxine-binding globulin precursor (TBG) in both vitreous and plasma of PDR and NPDR states and in plasma of diabetes mellitus (DM) state, are outstandingly higher than in non-diabetic control (MH or normal control), which means that TBG can function as a diabetes mellitus (DM) biomarker. Therefore, the present invention includes a biomarker composition for detecting diabetes mellitus comprising the protein as set forth in SEQ ID NO: 69. The molecule may be a monoclonal antibody, a polyclonal antibody, substrate, ligand, or cofactor; and blood or urine may be used as a test sample.

[0071] Hereinafter, the present invention will be described more specifically with reference to the following examples. The following examples are only for illustrative purposes and are not intended to limit the scope of the invention.

### Example 1

### 1. Test Method

[0072] (1) Patients and Vitreous Collection

[0073] We collected undiluted vitreous samples from 8 eyes of 8 PDR patients for the 2-DE experiment and from 11 eyes of 11 PDR patients for LC-MS/MS, during operations for tractional retinal detachment involving the macular region. Only patients that exhibited active neovascular membranes in extensive retinal areas were included, and those with gross vitreous hemorrhage or a history of recent vitreous hemorrhage, previous ocular surgery (including cataract surgery), or of another ocular disease, such as uveitis, were excluded. In order to acquire control samples from non-diabetic patients, we collected vitreous samples from 14 eyes with a small idiopathic macular hole (MH) (see Table 7).

TABLE 7

| Sample set | Mean age | Mean concentration: μg/μl |
|---|---|---|
| (patient numbers) | (range) | (range) |
| PDR for 2-DE | 62.5 | 5.6 |
| (n = 8) | (37-72) | (3.3-7.5) |
| PDR for LC-MS/MS | 56.0 | 6.4 |
| (n = 11) | (52-73) | (2.6-9.7) |
| MH for LC-MS/MS | 63.0 | 0.43 |
| (n = 14) | (45-71) | (0.10-1.21) |

[0074] MH vitreous samples were considered as non-diabetic controls because MH appears to develop as the result of vitreofoveal traction. Patients with other ocular diseases attributed to minor pathologic conditions were also excluded. All patients provided informed consent before being enrolled in the study, in accord with the protocol approved by the Institutional Review Board at Seoul National University Hospital. All protocols used in this study were also in full accord with the tenets of the Declaration of Helsinki.

[0075] Undiluted vitreous samples (0.5-0.8 ml) were collected at the commencement of pars plana vitrectomies performed using a Millennium microsurgical system (Bausch & Lomb, Rochester, N.Y.). In order to maintain intraocular pressure, vitreous was removed slowly with a vitreous cutter connected to a 1.0 ml syringe, while the sclera was indented. Harvested vitreous samples were collected in tubes, placed immediately on ice, and stored at −70° C. until required.

[0076] (2) Vitreous Sample Preparation

[0077] PDR and MH control samples were filtered/centrifuged at 15,000 g using 0.22 μm GV DURAPORE filter (Millipore company, Carrigtwohill, Co. Cork, Ireland) until all sample loaded passed completely through the filter. Protein concentrations were then determined using Bio-Rad protein assay reagents (Bio-Rad Laboratories, Hercules, Calif.). Generally, the protein concentrations of PDR samples were higher than those of controls (ca., 10 times higher; PDR samples 2.0˜10.0 μg/μl, control samples 0.1˜1.2 μg/μl). After collecting these clarified (filtered/centrifuged) vitreous samples from PDR and MH patients, 500 μl of individual samples from PDR or control MH patients were respectively pooled for 2-DE and LC-MS/MS experiments.

[0078] (3) Two Dimensional Gel Electrophoresis of Non-IS-Depleted PDR Samples

[0079] About 560 μg proteins in 100 μl of pooled PDR vitreous samples were subjected to TCA/acetone precipitation. Five volumes of 10% TCA in acetone containing 20 mM DTT was added to vitreous solution, stored at −20° C. for 4 hours, centrifuged at 28,000 g for 10 min, and the supernatant was then discarded. Five volumes of ice-cold acetone were added to the precipitant and the supernatant was then discarded to remove remaining TCA. After drying the pellet obtained using a speed vacuum, they were suspended in 250 μl rehydration buffer [7 M urea, 2 M thiourea, 2% CHAPS, 60 mM DTT and 0.5% (v/v) pharmalyte (pH 3-10)]. The concentration of pelleted vitreous protein in the rehydration solution was about 2 μg/μl, a calculated loss of ca. 25%. Pre-cast immobilized pH gradient strips (IPG strips, 13 cm, pH 4-7, linear, Amersham Biosciences, Uppsala, Sweden) were rehydrated overnight (12 hr) in a cassette using rehydration buffer. After aligning an IPG strip on an IEF tray, the voltage was increased incrementally. Initially, 500 V was applied for 1 hr, then 1000 V for 1 hr, and finally, 8000 V was applied to 14,500 VHr. IPG strips were equilibrated for 30 min in reducing solution (50 mM TrisHCl, pH 8.8, 6 M urea, 30% (v/v) glycerol, 2% (w/v) sodium dodecyl sulfate, 1% (w/v) DTT), and then for 30 min in the alkylating solution (identical to the reducing solution except that 2.5% (w/v) iodoacetamide was substituted for DTT). SDS-PAGE was conducted using 10% polyacrylamide gel using a standard SDS-PAGE protocol and an SE 600 Ruby gel unit (GE Healthcare, Uppsala, Sweden). Gels obtained were stained with silver staining solution. Three individual 2-DE experiments were carried out to obtain consistently detected spots.

[0080] (4) Two Dimensional Gel Electrophoresis of is-Depleted PDR Samples

[0081] The 12 high abundant proteins were depleted from PDR vitreous samples using an immunoaffinity subtraction (IS) system (Beckman Coulter ProteomeLab IgY-12 column, Beckman Coulter, Fullerton, Calif.), according to the manufacturer's instructions. This unit depleted the following 12 proteins: human serum albumin, IgG, fibrinogen, transferrin, IgA, IgM, HDL (apo A-I, apo A-II), haptoglobin, α1-antitrypsin, α1-acid glycoprotein, and α2-macroglobulin. 600 μg of PDR vitreous proteins were loaded on the IgY-12 column six times for column capacity reasons. Low abundance proteins were obtained in the flow-through fraction, whereas high abundance proteins bound to the antibody resin, and were recovered using stripping buffer, according to the manufacturer's instructions. Peptides in the flow-through and bound fractions were desalted by dialysis using Slide-A-Lyzer 3.5K dialysis cassettes kits (PIERCE, Rockford, Ill.) against 2 liters of distilled water three times. Thereafter, buffer exchange was carried out using an Amicon Ultra-4 10,000 (MILLIPORE, Bedford, Mass.) using 5 ml of rehydration buffer. The two resulting desalted samples (low and high abundance proteins) were then separated and visualized by 2-DE, respectively, as described in the previous section. Three individual 2-DE experiments were carried out to obtain consistently detected spots.

[0082] (5) In-Gel Trypsin Digestion

[0083] Excised gel pieces were destained in 30 mM potassium ferricyanide/100 mM sodium thiosulfate and then rinsed several times with 150 μl of distilled water until the yellow color of the ferricyanide completely disappeared. They were then dehydrated in 100% acetonitrile until they turned opaque white and rehydrated with 100 mM ammonium bicarbonate until transparent. This dehydration and rehydration process was repeated three times, and was followed by a single dehydration in 100% acetonitrile. The gel pieces were then dried in a vacuum centrifuge and rehydrated at 4° C. for 45 min in digestion buffer containing modified porcine trypsin in 50 mM ammonium bicarbonate at a concentration of 0.01 μg/μl (Promega, Madison, Wis.). Excess supernatant was then removed and gel pieces were soaked in 30 μl of 50 mM ammonium bicarbonate (NH₄HCO₃) overnight (16 hr) at 37° C. The solutions, which then contained cleaved peptides, were moved to new tubes.

[0084] (6) Peptide Mass Fingerprinting for 2-DE

[0085] Self-pack poros 20 R2 (Applied Biosystems, Foster City, Calif.) resin was packed inside a GEloader tip (Eppendorf AG, Hamburg, Germany), the end of which was twisted to cause the packed resin reside to be ca. 2 mm long. The trypsin-digested peptides were bound to the resin and washed with 0.1% Trifluoroacetic Acid (TFA). Bound peptides were eluted with 1 μl of sample matrix (5 mg/ml of α-cyano-4-hydroxy cinnamic acid in 70% ACN and 0.1% TFA solution). Eluted peptides were spotted on a 196 well MALDI plate. A 4700 proteomics analyzer (Applied Biosystems, Foster City, Calif.) was used in MS mode to identify proteins by peptide mass fingerprinting (PMF). The instrument was calibrated using 4700 cal mix (Applied Biosystems, Foster City, Calif.), which contained des-Arg-Bradykinin (monoisotopic mass: 904.4681), angiotensin I (monoisotopic mass: 1296.6853), Glu-Fibrinopeptide B (monoisotopic mass: 1570.6774), ACTH (1-17 clip, monoisotopic mass: 2093.0867), ACTH (18-39 clip, monoisotopic mass: 2465.1989) and ACTH (7-38 clip, monoisotopic mass: 3657.9294). MS data were acquired using 3,000 shots of a fixed intensity Nd:YAG laser at 355 nm and 200 Hz.

[0086] (7) PMF Data Analysis for 2-DE

[0087] The PMF proteomic search for in-gel digested peptide sample from 2-DE was conducted using GPS explorer software v3.5 and MASCOT v1.9 (Matrix Science, Boston, Mass.) as the database search engine. The minimum S/N was set at 10 and the following contaminant peaks were excluded during the search: 842.4, 870.5, 856.5, 771.1, 1794.8, 1475.7, 1993.9, 1383.6, 2211.1, 2705.1, 3338.8, 886.9, 893.0. The maximum number of missed cleavages was set to 1 for trypsin as protease and the precursor charge at +1. The differential peptide modifications allowed were the carbamidomethylation of cysteines and the oxidation of methionines. Acquired mass values were searched against the NCBInr database (updated 20 Feb., 2007) with a peptide mass tolerance of 150 ppm. Only identified proteins with a Confidence Index (C.I.)>95% were accepted.

[0088] (8) Nano LC Separation and Protein Identification by LC-MALDI-MS/MS Analysis

[0089] Albumin/IgG depleted PDR samples from 11 PDR patients, non-Albumin/IgG-depleted PDR samples from the same 11 patients, and control samples from 14 MH patients (Table 16) were pooled and loaded on SDS-PAGE gel (10% gel). One mg of each sample set (albumin/IgG depleted PDR, non-depleted PDR and non-depleted control) were loaded on two lanes (500 μg on each lane, FIG. 3A). The albumin/IgG depleted PDR samples were prepared using a ProteoExtract albumin/IgG removal kit (Calbiochem, San Diego, Calif.) to deplete albumin and IgG in PDR samples before loading them onto SDS-PAGE. After silver staining, gels were sliced into 16 pieces, and each piece was subjected to in-gel digestion as described above. The digested peptides were the vacuum-dried and resolved in 0.1% TFA or 0.1% formic acid in water. They were then desalted and concentrated using Ziptip_{C18} Pipette Tip (Millipore, Mass.).

[0090] The nano LC system used was an Ultimate 3000 unit (Switchos and Probot, Dionex, Amsterdam) coupled off-line to a MALDI-TOF/TOF (off-line LC-MALDI-MS/MS). This system was equipped with μ-Precolumn Cartridge (300 um i.d.×5 mm, C18 pepmap100, 5 μm, 100° C., Dionex, Amsterdam) and a reverse phase nano series column (75 μm i.d.×15 cm long column, C18 PepMap100, 3 μm, 100° C., Dionex). Initially, the trypsin generated peptide fragments were dissolved in 20 μl of 0.1% TFA and injected into the nano LC system using an autosampler equipped with a 20 μl sample loop. Injection was conducted in partial loop mode using a 10 μl injection volume. The trypsin generated peptide fragments were initially trapped in a precolumn, which was then washed with 0.05% TFA at 0.030 ml/min for 5 min. The precolumn containing bound peptides was then connected to 15 cm nano column using a valve switch.

[0091] The mobile phase to elute the peptide fragments consisted of 0.05% TFA, 5% acetonitrile in water (solution A) and 0.04% TFA, 80% acetonitrile in water (Solution B). Exponential gradient elution was performed by increasing the mobile phase composition from 0 to 50% of solution B over 30 min. The gradient was then ramped to 90% B for 5 min and back to 0% solution B for 20 min to equilibrate the column for the next run. The total run time was 60 min. This gradient was applied to the nano column at 300 nl/min at room temperature. Eluent was monitored at 214 nm by UV absorbance. Fractionated peptides were spotted on a 144 well MALDI plate at 20 sec per spot using the Probot system (Dionex). The matrix solution (6.2 mg/ml of α-cyano-4-hydroxy cinnamic acid (Agilent Technologies, Santa Clara, Calif.) in 36.0% methanol, 56.0% acetonitrile and 8.0% distilled water) was mixed with the mobile phase at 0.976 μl/min when spotting on the MALDI plate.

[0092] Peptide mass values were analyzed using the parameters mentioned for 2-DE analysis above and the 4700 analyzer. The 15 most intense peptides with S/N ratios exceeding 10 were subjected to MS/MS. The collision energy was set at 1 kV and the collision gas was air. MS/MS analysis was conducted using GPS explorer software (v3.5) and the MASCOT search engine (v1.9) using the same parameters used for 2-DE PMF analysis, but without exclusion peak filtering. Searching was performed against the Human International Protein Index (IPI) protein sequence database and included searches for known contaminants (IPI versions 3.24). The MASCOT search result from LC-MALDI-MS/MS analysis with the ‘dat’ file extension, was converted to pepXML file for further validation using the Trans-Proteomic Pipeline (TPP), according to instructions on the web.

[0093] (9) Nano LC Separation and Protein Identification by LC-ESI-MS/MS

[0094] In contrast with the LC-MALDI-MS/MS method which is based on MALDI ionization and the MASCOT algorithm, LC-ESI-MSMS results were based on ESI ionization and the SEQUEST algorithm. Thus, the other half of in-gel digested peptide samples from SDS-PAGE gel were used for protein identification using nano LC-ESI-MS/MS.

[0095] A binary Agilent nanoflow 1200 series HPLC system (Agilent Technologies Inc., is Santa Clara, Calif.) was directly coupled to a Thermo Electron model LTQ electrospray ionization linear single-quadrupole ion trap mass spectrometer (Thermo Fisher Scientific, Inc. Waltham, Mass.) fitted with an automatic gain control to avoid space charge limitations. In-gel digested peptides in 10 μl of aqueous formic acid (0.1%) were injected into the nano LC-ESI-MS/MS instrument. Peptides were separated by reverse-phase column chromatography and loaded on a 12 cm×75 μm capillary column packed in-house (Magic C18aq, Michrom Bioresources, Inc., Auburn, Calif.) using helium pressure cells. Gradient elution of the proteome sample was achieved using 90% solvent A (0.1% formic acid in H₂O) to 40% solvent B (0.1% formic acid in acetonitrile) at 250 nl/min over 120 min. A blank run was performed between sample runs to avoid cross contamination.

[0096] We used MS survey scanning from 300-2000 m/z followed by three data-dependent MS/MS scans (isolation width 2 m/z, normalized collision energy 35%, dynamic exclusion duration 30 s). Protein identifications from tandem mass spectra were first carried out using SEQUEST search software (Sequest cluster v3.2, initial mass tolerances for protein identification from MS peaks was 3 Da, and from MS/MS peaks was 1 Da. Two missed cleavages were allowed.) against the same IPI database as the MASCOT search mentioned above. SEQUEST search results based on LC-ESI-MS/MS analysis (LTQ) were converted to pepXML file for further validation using TPP.

[0097] (10) Filtering Search Results Using the Trans-Proteomic Pipeline

[0098] Search result files from MASCOT and SEQUEST in pepXML format were processed using the PeptideProphet and ProteinProphet modules in TPP, according to the instructions given. Peptides sequenced by MS/MS analysis were validated by PeptideProphet such that all sequenced peptides were allocated a probability based on parameters, such as, ion score, identity score, homology score, NTT in the case of MASCOT results, and Xcorr, dCn, Sp, NTT for SEQUEST results. ProteinProphet validated these peptides and determined the proteins most likely to contain these peptides. Probability cut-offs for running the PeptideProphet and ProteinProphet modules were set at 0.50 and 0.90, respectively. All processes like creating pepXML and determining scoring probabilities by PeptideProphet and ProteinProphet were carried out against the MASCOT and SEQUEST database mentioned above. Final TPP outputs from ProteinProphet were exported to Excel files for data merging and comparison. Processing by TPP allowed us to determine definite vitreous proteome profiles that consisted of proteins with high probability and reduced redundancy in the protein lists.

[0099] (11) Processing for Gene Ontology Annotation

[0100] IPI accession numbers were translated into Uniprot accession numbers (Swiss-prot numbers or TrEMBL numbers) by manually looking at matched accession numbers in the IPI database. Gene ontology (GO) was then assigned to Uniprot numbers using the QuickGO web tool. Each Uniprot number was assigned to three categories, i.e., biological process, function, and component. To avoid complexities resulting from detailed GO annotation, GO slim (level 3) was applied. If a single protein had been annotated by several processes, functions or components, all of such annotations were reflected in data representation redundantly.

### 2. Results and Discussion

[0101] (1) Protein Identification from PDR Vitreous Humor by Two-Dimensional Gel Electrophoresis

[0102] IgY-12 columns have been previously used to deplete 12 highly abundant proteins from human or primate biological fluids. Likewise, PDR vitreous samples were treated using IgY-12 columns, and subsequently the high and low abundance protein fractions obtained were subjected to 2-DE. Forty-seven spots were excised from the low abundance protein gel and 6 spots were matched to the NCBInr database (12.8%) and 5 proteins were identified (see FIG. 2). 116 spots were excised from the high abundance protein gel and 87 were matched to the database (75.0%) and 25 proteins were identified (see FIG. 2). In addition, we performed 2-DE on PDR samples not subjected to immunoaffinity subtraction (IS). In total 69 spots were excised, 54 were matched (78.3%), and 28 proteins were identified (see FIG. 2). From the identified protein lists for all three samples, 49 proteins were identified (see FIG. 2).

[0103] The identification rate was low in the low abundance protein gel. Of the 47 picked spots, only 6 were matched to the NCBInr database (12.8%). This may have been due to the low concentration of spots after in-gel digestion or the low yields of low abundance proteins. Therefore, we did not use perform IS on the MH control sample because the protein concentration in MH vitreous humor was roughly one tenth of than in PDR vitreous humor (MH protein concentration was 0.47 μg/μl, and PDR concentration was 4.13 μg/μl). Consequently, larger samples quantities should be obtained or a more sensitive instrument used to identify low abundance proteins in MH vitreous.

[0104] Of the 5 proteins that were identified in low abundance PDR gel, only two proteins (hemopexin and ARL6IP4) were detected in low abundance PDR gel (FIG. 2) and not in the other two gels (high abundance PDR gel and the non-IS-treated PDR gel). No new proteins were identified in low abundance PDR protein gel, but the 2-DE gel image of low abundance PDR proteins differed from that of non-IS-treated PDR proteins, which suggests the possibility that more low abundance proteins would have been be identified in the enriched fraction that had the detection limit of the method lower.

[0105] (2) Vitreous Protein Identification Using Nano LC-MALDI-MS/MS

[0106] In order to detect low abundance proteins in the PDR and control MH samples, we performed nano LC fractionation and protein identification using off-line nano LC-MALDI-MS/MS.

[0107] The 2-DE gel pattern of high abundance proteins in the IS-depleted PDR sample was similar to that in the corresponding non-IS-depleted PDR sample, which suggests that high abundance proteins account for most protein in vitreous humor. Therefore, we decided to use a relatively mild depletion method to prepare the depleted PDR vitreous sample, i.e., to deplete the PDR sample for nano LC-MALDI-MS/MS, we used a Calbiochem kit to remove only the two most abundant proteins, i.e., albumin and IgG.

[0108] The prepared PDR, albumin/IgG depleted PDR, and control MH vitreous samples were run in SDS-PAGE gel, and gels were subsequently sliced evenly into 16 fractions (FIG. 3). After in-gel trypsin digestion, peptides in 20 μl of 0.1% TFA solution were injected into a nano LC equipped with autosampler using a 20 μl sample loop. The injected peptides were subject to nano LC separation 16 times and every nano LC run was followed by a blank run to avoid cross contamination. Peptides eluted from the nano LC were collected on a MALDI target plate (FIG. 4) and analyzed in MS/MS mode (FIGS. 5 and 6) and search results were revalidated using PeptideProphet and ProteinProphet in TPP.

[0109] As a result (FIG. 7A), 54 proteins were identified in the albumin/IgG depleted PDR sample and 49 in the non-depleted PDR sample. In the control sample, 50 proteins were identified. In total, 83 proteins were identified in these three vitreous samples. A Venn diagram of the identified proteins is provided in FIG. 7A.

[0110] We carried out database searches using the NCBInr database (updated 20 Feb., 2007) and the IPI database (v3.24) for the 2-DE and LC-MALDI-MS/MS experiments. The result obtained from the NCBInr database are not included (data not shown), since it provoked data redundancy and complexity. Consequently, we used only the IPI database for reasons of experimental efficiency in this proteomics study.

[0111] (3) Vitreous Protein Identification Using Nano LC-ESI-MS/MS

[0112] To increase protein identification, we employed a complementary analytical platform, namely, nano LC-ESI-MS/MS. As a result of our nano LC-ESI-MS/MS experiment (FIG. 7B), 356 proteins were identified in albumin/IgG depleted PDR vitreous humor and 136 proteins in non-depleted PDR vitreous humor. 335 proteins were identified in the control MH vitreous sample. In total 518 proteins were identified in the non-depleted PDR, albumin/IgG depleted PDR, and control MH vitreous samples using LC-ESI-MS/MS (FIG. 7B). 183 (A, B, C of the Venn diagram) of the 518 proteins were found to be present only in PDR vitreous and 115 proteins (G of the Venn diagram) only in control vitreous. 220 proteins are present in the overlapping region of the Venn diagram (D, E, F of the Venn diagram).

[0113] (4) Identified Protein Lists from LC-MALDI-MS/MS and LC-ESI-MS/MS

[0114] The proteins identified using these two different ionization methods (MALDI and ESI) were combined to generate a collective vitreous proteome. 83 proteins identified by LC-MALDI-MS/MS and 518 proteins identified by LC-ESI-MS/MS generated a merged vitreous proteome profile consisting of 531 proteins (FIG. 7C). The identified protein lists from these two LC-MS/MS experiments included all proteins identified by 2-DE. The 531 proteins are as in the following Table 8 to 16.

TABLE 8

| | | | Newly | | | | | Probabil- | | |
|---|---|---|---|---|---|---|---|---|---|---|
| | | Sub- | detected | Detected | | | | ity | Number | Total |
| Venn | Total | group | in | in | | | | of | of | number |
| diagram | num- | num- | vitreous | plasma | | IPI accession | | Protein | unique | of |
| location | ber | ber | prote | proteome | Protein name | number | Method | Prophet | peptides | peptides |
| A | 1 | 1 | * | | 101 KDA PROTEIN | IPI00760855 | LTQ | 1 | 20 | 75 |
| | 2 | 2 | * | | 13 kDa protein | IPI00743473 | LTQ | 0.9 | 1 | 1 |
| | 3 | 3 | * | | 14-3-3 protein epsilon | IPI00000816 | LTQ | 1 | 4 | 4 |
| | 4 | 4 | * | * | 16 kDa protein | IPI00218733 | LTQ | 0.94 | 1 | 2 |
| | 5 | 5 | * | * | 184 KDA PROTEIN | IPI00303313 | LTQ | 1 | 4 | 4 |
| | 6 | 6 | * | | 57 kDa protein | IPI00383111 | LTQ | 1 | 13 | 41 |
| | 7 | 7 | * | | 97 KDA PROTEIN | IPI00794184 | LTQ | 1 | 76 | 366 |
| | 8 | 8 | * | * | Adiponectin precursor | IPI00020019 | LTQ | 1 | 2 | 4 |
| | 9 | 9 | * | | ADP-ribosylation factor 1 | IPI00215914 | LTQ | 1 | 2 | 2 |
| | 10 | 10 | * | | ALPHA3A | IPI00377045 | LTQ | 1 | 2 | 2 |
| | 11 | 11 | | | Amyloid lambda 6 light chain variable region | IPI00386839 | LTQ | 1 | 1 | 2 |
| | | | | | SAR (Fragment) | | | | | |
| | 12 | 12 | * | | ANNEXIN A2 ISOFORM 1 | IPI00418169 | LTQ | 0.9 | 2 | 2 |
| | 13 | 13 | | | ANTITHROMBIN III VARIANT | IPI00165421 | LTQ | 1 | 4 | 14 |
| | 14 | 14 | | * | Apolipoprotein C-III precursor | IPI00021857 | LTQ | 0.94 | 1 | 1 |
| | 15 | 15 | | * | apolipoprotein F precursor | IPI00299435 | LTQ | 0.94 | 1 | 1 |
| | 16 | 16 | | * | Apolipoprotein M | IPI00030739 | LTQ | 1 | 8 | 14 |
| | 17 | 17 | | | Beta crystallin A4 | IPI00419283 | LTQ | 1 | 7 | 8 |
| | 18 | 18 | * | | Beta-hexosaminidase beta chain precursor | IPI00012585 | LTQ | 1 | 2 | 2 |
| | 19 | 19 | * | | Biglycan precursor | IPI00010790 | LTQ | 1 | 2 | 2 |
| | 20 | 20 | | * | C4B-BINDING PROTEIN ALPHA CHAIN | IPI00021727 | LTQ | 0.94 | 1 | 1 |
| | | | | | PRECURSOR | | | | | |
| | 21 | 21 | * | | Calcium/calmodulin-dependent 3′,5′-cyclic | IPI00005592 | LTQ | 1 | 2 | 3 |
| | | | | | nucleotide phosphodiesterase 1B | | | | | |
| | 22 | 22 | * | * | CALMODULIN-LIKE PROTEIN 5 | IPI00021536 | LTQ | 0.94 | 1 | 2 |
| | 23 | 23 | | | Catalase | IPI00465436 | LTQ | 0.92 | 1 | 1 |
| | 24 | 24 | * | | CD59 glycoprotein precursor | IPI00011302 | LTQ | 1 | 4 | 8 |
| | 25 | 25 | * | | CDNA FLJ25678 fis, clone TST04067, highly | IPI00017672 | LTQ | 1 | 4 | 5 |
| | | | | | similar to PURINE NUCLEOSIDE | | | | | |
| | | | | | PHOSPHORYLASE | | | | | |
| | 26 | 26 | * | | CDNA FLJ41981 fis, clone SMINT2011888, | IPI00784830 | LTQ | 1 | 2 | 3 |
| | | | | | highly similar to Protein Tro alpha1 H, myeloma | | | | | |
| | 27 | 27 | * | * | Cholinesterase precursor | IPI00025864 | LTQ | 1 | 2 | 2 |
| | 28 | 28 | | * | Coagulation factor IX precursor | IPI00296176 | LTQ | 0.94 | 1 | 3 |
| | 29 | 29 | * | | Cofilin-1 | IPI00012011 | LTQ | 1 | 2 | 2 |
| | 30 | 30 | | * | Collagen alpha-1(VI) chain precursor | IPI00291136 | LTQ | 1 | 3 | 4 |
| | 31 | 31 | | | Collagen alpha-2(I) chain precursor | IPI00304962 | LTQ | 1 | 3 | 3 |
| | 32 | 32 | | * | Complement C1q subcomponent subunit A | IPI00022392 | LTQ | 1 | 2 | 2 |
| | | | | | precursor | | | | | |
| | 33 | 33 | | | Complement C3 precursor (Fragment) | IPI00783987 | LTQ | 1 | 103 | 640 |
| | 34 | 34 | | * | Complement C4-A precursor | IPI00032258 | LTQ | 1 | 11 | 74 |
| | 35 | 35 | * | | Corneodesmosin precursor | IPI00386809 | LTQ | 0.94 | 1 | 1 |
| | 36 | 36 | * | | Dermatopontin precursor | IPI00292130 | LTQ | 1 | 3 | 3 |
| | 37 | 37 | | * | Dystroglycan precursor | IPI00028911 | LTQ | 1 | 3 | 3 |
| | 38 | 38 | * | | E3 UBIQUITIN-PROTEIN LIGASE HECTD1 | IPI00328911 | LTQ | 0.92 | 2 | 5 |
| | 39 | 39 | * | | Endothelial protein C receptor precursor | IPI00009276 | LTQ | 1 | 2 | 3 |
| | 40 | 40 | * | | FERRITIN HEAVY CHAIN | IPI00554521 | LTQ | 0.99 | 1 | 1 |
| | 41 | 41 | * | | FERRITIN LIGHT POLYPEPTIDE VARIANT | IPI00796538 | LTQ | 1 | 10 | 19 |
| | 42 | 42 | * | * | Fetuin-B precursor | IPI00005439 | LTQ | 1 | 5 | 5 |
| | 43 | 43 | * | | FIBRONECTIN 1 ISOFORM 4 | IPI00414283 | LTQ | 0.98 | 1 | 1 |
| | | | | | PREPROPROTEIN | | | | | |
| | 44 | 44 | * | | Fructose-bisphosphate aldolase C | IPI00418262 | LTQ | 0.98 | 2 | 2 |
| | 45 | 45 | | | Gamma crystallin C | IPI00220282 | LTQ | 1 | 5 | 5 |
| | 46 | 46 | | | Gamma crystallin D | IPI00215881 | LTQ | 1 | 2 | 3 |
| | 47 | 47 | * | * | Gamma-glutamyl hydrolase precursor | IPI00023728 | LTQ | 1 | 5 | 6 |
| | 48 | 48 | * | | Gastrokine-1 precursor | IPI00021342 | LTQ | 1 | 4 | 5 |
| | 49 | 49 | | * | Glutathione S-transferase P | IPI00219757 | LTQ | 0.94 | 1 | 1 |
| | 50 | 50 | | * | Glyceraldehyde-3-phosphate dehydrogenase | IPI00219018 | LTQ | 1 | 5 | 12 |
| | 51 | 51 | * | * | Growth/differentiation factor 8 precursor | IPI00023751 | LTQ | 0.94 | 1 | 1 |
| | 52 | 52 | | | Hemoglobin subunit gamma-1 | IPI00220706 | LTQ | 1 | 4 | 5 |
| | 53 | 53 | * | * | Hepatocyte growth factor activator precursor | IPI00029193 | LTQ | 1 | 2 | 2 |
| | 54 | 54 | * | | Hornerin | IPI00398625 | LTQ | 1 | 1 | 2 |
| | 55 | 55 | | | HYPOTHETICAL PROTEIN | IPI00784519 | LTQ | 1 | 1 | 1 |
| | 56 | 56 | | | | IPI00784894 | LTQ | 1 | 4 | 6 |
| | 57 | 57 | | | Hypothetical protein DKFZp686C02220 | IPI00423461 | LTQ | 1 | 2 | 6 |
| | | | | | (Fragment) | | | | | |
| | 58 | 58 | | | Hypothetical protein DKFZp686K04218 | IPI00384952 | LTQ | 0.93 | 1 | 3 |
| | | | | | (Fragment) | | | | | |
| | 59 | 59 | | | HYPOTHETICAL PROTEIN | IPI00423462 | LTQ | 0.99 | 1 | 1 |
| | | | | | DKFZP686K18196 (FRAGMENT) | | | | | |
| | 60 | 60 | | * | hypothetical protein LOC80208 | IPI00101923 | LTQ | 1 | 3 | 4 |
| | 61 | 61 | * | | Hypoxanthine-guanine phosphoribosyltransferase | IPI00218493 | LTQ | 0.93 | 1 | 1 |
| | 62 | 62 | | * | Ig kappa chain V-III region VH precursor | IPI00024138 | LTQ | 0.9 | 1 | 1 |

TABLE 9

| | | | Newly | | | | | Proba- | | |
|---|---|---|---|---|---|---|---|---|---|---|
| | | Sub- | detected | Detected | | | | bility | Number | Total |
| Venn | Total | group | in | in | | | | of | of | number |
| diagram | num- | num- | vitreous | plasma | | IPI accession | | Protein | unique | of |
| location | ber | ber | proteome | proteome | Protein name | number | Method | Prophet | peptides | peptides |
| | 63 | 63 | | | Ig lambda chain V-III region SH | IPI00382436 | LTQ | 0.94 | 1 | 2 |
| | 64 | 64 | | | IGHM PROTEIN | IPI00549291 | LTQ | 1 | 15 | 25 |
| | 65 | 65 | | | IGKC PROTEIN | IPI00761125 | LTQ | 1 | 1 | 1 |
| | 66 | 66 | | | IGLV6-57 protein | IPI00419442 | LTQ | 1 | 1 | 1 |
| | 67 | 67 | | * | immunoglobulin J chain | IPI00178926 | LTQ | 1 | 2 | 2 |
| | 68 | 68 | | | Immunoglobulin lambda-like | IPI00013438 | LTQ | 0.94 | 1 | 1 |
| | | | | | polypeptide 1 precursor | | | | | |
| | 69 | 69 | | * | Insulin-like growth factor-binding | IPI00297284 | LTQ | 0.96 | 1 | 1 |
| | | | | | protein 2 precursor | | | | | |
| | 70 | 70 | | | Insulin-like growth factor-binding | IPI00029236 | LTQ | 1 | 2 | 3 |
| | | | | | protein 5 precursor | | | | | |
| | 71 | 71 | | * | Inter-alpha-trypsin inhibitor heavy | IPI00028413 | LTQ | 1 | 7 | 9 |
| | | | | | chain H3 precursor | | | | | |
| | 72 | 72 | * | * | Intercellular adhesion molecule 2 | IPI00009477 | LTQ | 0.93 | 1 | 1 |
| | | | | | precursor | | | | | |
| | 73 | 73 | * | | Isoform 1 of Arginase-1 | IPI00291560 | LTQ | 1 | 2 | 2 |
| | 74 | 74 | | * | Isoform 1 of Collagen alpha-1(III) chain | IPI00021033 | LTQ | 0.92 | 1 | 1 |
| | | | | | precursor | | | | | |
| | 75 | 75 | | | Isoform 1 of Complement C1q tumor | IPI00008860 | LTQ | 0.94 | 1 | 1 |
| | | | | | necrosis factor-related protein 3 | | | | | |
| | | | | | precursor | | | | | |
| | 76 | 76 | * | * | Isoform 1 of Contactin-4 precursor | IPI00178854 | LTQ | 0.93 | 1 | 1 |
| | 77 | 77 | * | * | Isoform 1 of C-reactive protein | IPI00022389 | LTQ | 1 | 2 | 2 |
| | | | | | precursor | | | | | |
| | 78 | 78 | * | * | Isoform 1 of Ficolin-3 precursor | IPI00293925 | LTQ | 1 | 7 | 7 |
| | 79 | 79 | | | Isoform 1 of Haptoglobin-related | IPI00477597 | LTQ | 1 | 13 | 20 |
| | | | | | protein precursor | | | | | |
| | 80 | 80 | * | * | Isoform 1 of Mannan-binding lectin | IPI00294713 | LTQ | 1 | 3 | 5 |
| | | | | | serine protease 2 precursor | | | | | |
| | 81 | 81 | * | * | Isoform 1 of Multiple epidermal growth | IPI00027310 | LTQ | 1 | 2 | 2 |
| | | | | | factor-like domains 8 | | | | | |
| | 82 | 82 | * | | Isoform 1 of Phosphatidylinositol-glycan- | IPI00299503 | LTQ | 1 | 5 | 5 |
| | | | | | specific phospholipase D precursor | | | | | |
| | 83 | 83 | * | | ISOFORM 1 OF PHOSPHOLIPID | IPI00643034 | LTQ | 1 | 4 | 5 |
| | | | | | TRANSFER PROTEIN PRECURSOR | | | | | |
| | 84 | 84 | * | * | Isoform 1 of Plexin domain-containing | IPI00044369 | LTQ | 0.94 | 1 | 1 |
| | | | | | protein 2 precursor | | | | | |
| | 85 | 85 | * | * | Isoform 1 of Probable helicase senataxin | IPI00142538 | LTQ | 0.99 | 2 | 2 |
| | 86 | 86 | | * | Isoform 1 of Scavenger receptor cysteine- | IPI00104074 | LTQ | 1 | 3 | 4 |
| | | | | | rich type 1 protein M130 precursor | | | | | |
| | 87 | 87 | * | * | Isoform A of Proteoglycan-4 precursor | IPI00024825 | LTQ | 1 | 2 | 2 |
| | 88 | 88 | | * | Isoform Long of Complement factor H- | IPI00006154 | LTQ | 0.91 | 1 | 1 |
| | | | | | related protein 2 precursor | | | | | |
| | 89 | 89 | * | * | Kallistatin precursor | IPI00328609 | LTQ | 1 | 3 | 3 |
| | 90 | 90 | | | KERATIN, TYPE I CYTOSKELETAL 17 | gi\|547751\|sp\|Q [symbol] | LTQ | 1 | 5 | 6 |
| | | | | | (CYTOKERATIN 17) (K17) (CK 17) (39 | | | | | |
| | 91 | 91 | | | Keratin-80 | IPI00375843 | LTQ | 1 | 3 | 3 |
| | 92 | 92 | * | * | Lipopolysaccharide-binding protein | IPI00032311 | LTQ | 1 | 5 | 5 |
| | | | | | precursor | | | | | |
| | 93 | 93 | * | | Lithostathine 1 alpha precursor | IPI00009027 | LTQ | 1 | 4 | 4 |
| | 94 | 94 | * | * | Macrophage colony-stimulating factor 1 | IPI00011218 | LTQ | 0.94 | 1 | 1 |
| | | | | | receptor precursor | | | | | |
| | 95 | 95 | * | * | MAN1A1 PROTEIN | IPI00291641 | LTQ | 0.93 | 1 | 1 |
| | 96 | 96 | | | Microfibril-associated glycoprotein 4 | IPI00022792 | LTQ | 1 | 3 | 3 |
| | | | | | precursor | | | | | |
| | 97 | 97 | * | * | MIMECAN PRECURSOR | IPI00025465 | LTQ | 0.94 | 1 | 1 |
| | 98 | 98 | * | | MUCIN-5B PRECURSOR | IPI00384897 | LTQ | 1 | 5 | 6 |
| | 99 | 99 | * | * | Multimerin-2 precursor | IPI00015525 | LTQ | 1 | 4 | 7 |
| | 100 | 100 | * | * | Myocilin precursor | IPI00019190 | LTQ | 1 | 5 | 5 |
| | 101 | 101 | * | | Myoglobin | IPI00217493 | LTQ | 0.93 | 1 | 1 |
| | 102 | 102 | * | | Neurexin 3-alpha | IPI00216728 | LTQ | 1 | 3 | 3 |
| | 103 | 103 | | * | Neutrophil defensin 1 precursor | IPI00005721 | LTQ | 0.93 | 1 | 1 |
| | 104 | 104 | | * | Neutrophil gelatinase-associated lipocalin | IPI00299547 | LTQ | 1 | 4 | 6 |
| | | | | | precursor | | | | | |
| | 105 | 105 | * | * | Nidogen-2 precursor | IPI00028908 | LTQ | 0.94 | 1 | 1 |
| | 106 | 106 | | | BETA CASEIN PRECURSOR. - | CASB_BOVIN | LTQ | 0.96 | 1 | 1 |
| | | | | | BOS TAURUS (BOVINE) | | | | | |
| | 107 | 107 | | | VATVSLPR-like Promega trypsin | Trypa1\|PromTArt1 | LTQ | 1 | 2 | 45 |
| | | | | | artifact 1 (871.1) xATVSLPR | | | | | |
| | 108 | 108 | * | * | PEPTIDYL-PROLYL CIS-TRANS | IPI00024129 | LTQ | 0.9 | 1 | 1 |
| | | | | | ISOMERASE C | | | | | |
| | 109 | 109 | | * | Peroxiredoxin-2 | IPI00027350 | LTQ | 1 | 6 | 8 |
| | 110 | 110 | * | | Phosphatidylethanolamine-binding | IPI00219446 | LTQ | 1 | 4 | 5 |
| | | | | | protein 1 | | | | | |
| | 111 | 111 | | * | Phosphoglycerate kinase 1 | IPI00169383 | LTQ | 1 | 2 | 2 |
| | 112 | 112 | * | * | Pregnancy zone protein precursor | IPI00025426 | LTQ | 1 | 20 | 149 |
| | 113 | 113 | | * | protease inhibitor 16 precursor | IPI00301143 | LTQ | 1 | 2 | 2 |
| | 114 | 114 | * | | Protein DJ-1 | IPI00298547 | LTQ | 0.94 | 1 | 1 |
| | 115 | 115 | * | | Pseudogene candidate | IPI00454869 | LTQ | 1 | 2 | 3 |
| | 116 | 116 | * | | Rho GDP-dissociation inhibitor 2 | IPI00003817 | LTQ | 1 | 2 | 2 |
| | 117 | 117 | * | * | Serpin B4 | IPI00010303 | LTQ | 0.93 | 1 | 1 |
| | 118 | 118 | | | SERUM ALBUMIN PRECURSOR | gi\|113574\|sp\|P [symbol] | LTQ | 1 | 9 | 20 |
| | 119 | 119 | | | similar to C3 and PZP-like, alpha-2- | IPI00249915 | LTQ | 1 | 2 | 2 |
| | | | | | macroglobulin domain containing 8 | | | | | |
| | 120 | 120 | | | Similar to Ig kappa chain V-IV region | IPI00026197 | LTQ | 0.94 | 4 | 9 |
| | | | | | STH | | | | | |
| | 121 | 121 | | | SINGLE-CHAIN FV (FRAGMENT) | IPI00748998 | LTQ | 1 | 3 | 3 |
| | 122 | 122 | * | * | SUPEROXIDE DISMUTASE [MN], | IPI00022314 | LTQ | 0.94 | 1 | 1 |
| | | | | | MITOCHONDRIAL PRECURSOR | | | | | |
| | 123 | 123 | * | * | Thioredoxin | IPI00216298 | LTQ | 0.93 | 1 | 1 |

[symbol]

indicates data missing or illegible when filed

TABLE 10

| | | | Newly | | | | | Proba- | | |
|---|---|---|---|---|---|---|---|---|---|---|
| | | Sub- | detected | Detected | | | | bility | Number | Total |
| Venn | Total | group | in | in | | | | of | of | number |
| diagram | num- | num- | vitreous | plasma | | IPI accession | | Protein | unique | of |
| location | ber | ber | proteome | proteome | Protein name | number | Method | Prophet | peptides | peptides |
| | 124 | 124 | * | * | Thyroxine-binding globulin precursor | IPI00292946 | LTQ | 1 | 21 | 56 |
| | 125 | 125 | * | | TRIOSEPHOSPHATE ISOMERASE 1 | IPI00465028 | LTQ | 1 | 6 | 7 |
| | | | | | VARIANT | | | | | |
| | 126 | 126 | * | * | UNCHARACTERIZED PROTEIN C7ORF24 | IPI00031564 | LTQ | 0.94 | 1 | 1 |
| | 127 | 127 | * | | V1-17 protein | IPI00045547 | LTQ | 1 | 3 | 6 |
| | 128 | 128 | * | | V1-5 protein (Fragment) | IPI00553215 | LTQ | 0.94 | 1 | 1 |
| | 129 | 129 | * | * | von Willebrand factor precursor | IPI00023014 | LTQ | 1 | 3 | 3 |
| | 130 | 130 | * | | WSB-1 ISOFORM | IPI00383777 | LTQ | 0.91 | 1 | 1 |
| B | 131 | 1 | | | Alpha crystallin B chain | IPI00021369 | LTQ | 1 | 20 | 104 |
| | 132 | 2 | | * | Apolipoprotein B-100 precursor | IPI00022229 | LTQ | 1 | 36 | 43 |
| | 133 | 3 | | | Collagen alpha-1(I) chain precursor | IPI00297646 | LTQ | 1 | 4 | 4 |
| | 134 | 4 | | * | Fibrinogen beta chain precursor | IPI00298497 | MAL | 1 | 37 | 120 |
| | 135 | 5 | | | Haptoglobin precursor | IPI00641737 | LTQ | 1 | 18 | 363 |
| | 136 | 6 | | | Ig kappa chain V-I region Mev | IPI00387105 | LTQ | 0.93 | 1 | 2 |
| | 137 | 7 | | | Ig kappa chain V-II region TEW | IPI00736885 | LTQ | 1 | 4 | 8 |
| | 138 | 8 | | | IGLV3-25 PROTEIN | IPI00550162 | LTQ | 1 | 3 | 193 |
| | 139 | 9 | | * | Isoform 1 of Fibronectin precursor | IPI00022418 | MAL | 0.99 | 1 | 1 |
| | 140 | 10 | | * | Serum amyloid P-component precursor | IPI00022391 | MAL | 1 | 5 | 9 |
| C | 141 | 1 | | | (S43646) cytokeratin 2, CK 2 [human, | gi\|254622\|bbs\| | LTQ | 1 | 9 | 38 |
| | | | | | epidermis, Peptide, 645 aa] [Homo sapiens] | | | | | |
| | 142 | 2 | * | | 10 kDa protein | IPI00740756 | LTQ | 1 | 2 | 17 |
| | 143 | 3 | * | | 25 kDa protein | IPI00448800 | LTQ | 1 | 2 | 125 |
| | 144 | 4 | * | * | 272 KDA PROTEIN | IPI00219299 | LTQ | 0.91 | 2 | 3 |
| | 145 | 5 | * | | 330 kDa protein | IPI00163866 | LTQ | 0.99 | 2 | 2 |
| | 146 | 6 | * | | 3′-5′ exoribonuclease CSL4 homolog | IPI00032823 | LTQ | 0.95 | 1 | 1 |
| | 147 | 7 | * | | ACF7 PROTEIN | IPI00183169 | LTQ | 0.91 | 2 | 2 |
| | 148 | 8 | * | | Actin, aortic smooth muscle | IPI00008603 | LTQ | 0.99 | 1 | 1 |
| | 149 | 9 | | | ALPHA-A-CRYSTALLIN | IPI00795775 | LTQ | 0.98 | 1 | 1 |
| | 150 | 10 | * | * | ATP-binding cassette, sub-family A, member 2 | IPI00307592 | LTQ | 0.97 | 2 | 8 |
| | | | | | isoform a | | | | | |
| | 151 | 11 | * | | BONE MORPHOGENETIC PROTEIN | IPI00005731 | LTQ | 0.93 | 2 | 2 |
| | | | | | RECEPTOR TYPE IA PRECURSOR | | | | | |
| | 152 | 12 | | * | Brain-specific serine protease 4 precursor | IPI00005467 | LTQ | 0.99 | 2 | 2 |
| | 153 | 13 | | * | CADHERIN-20 PRECURSOR | IPI00307612 | LTQ | 1 | 2 | 3 |
| | 154 | 14 | * | | CDNA: FLJ21459 fis, clone COL04714 | IPI00001606 | LTQ | 0.99 | 2 | 29 |
| | 155 | 15 | * | * | CENTROMERE PROTEIN F | IPI00027157 | LTQ | 0.97 | 2 | 2 |
| | 156 | 16 | * | | CRYPTOCHROME-1 | IPI00002540 | LTQ | 0.91 | 2 | 4 |
| | 157 | 17 | * | * | Dpy-19-like protein 1 | IPI00007461 | LTQ | 1 | 2 | 31 |
| | 158 | 18 | * | * | EXOCYST COMPLEX COMPONENT 8 | IPI00028264 | LTQ | 0.98 | 2 | 2 |
| | 159 | 19 | | | Hypothetical protein DKFZp686E23209 | IPI00784942 | LTQ | 1 | 7 | 222 |
| | 160 | 20 | | | Hypothetical protein DKFZp686I04196 | IPI00399007 | MAL | 1 | 4 | 17 |
| | | | | | (Fragment) | | | | | |
| | 161 | 21 | | | Ig kappa chain V-I region OU | IPI00387098 | LTQ | 1 | 2 | 4 |
| | 162 | 22 | | | IG KAPPA CHAIN V-IV REGION B17 | IPI00386133 | LTQ | 1 | 6 | 102 |
| | | | | | PRECURSOR | | | | | |
| | 163 | 23 | | * | IGHA1 PROTEIN | IPI00061977 | MAL | 1 | 3 | 5 |
| | 164 | 24 | | | | IPI00744561 | LTQ | 1 | 7 | 28 |
| | 165 | 25 | | | IGL@ PROTEIN | IPI00658130 | MAL | 1 | 5 | 15 |
| | 166 | 26 | * | | ISOFORM 1 OF ALANINE | IPI00152432 | LTQ | 0.94 | 2 | 2 |
| | | | | | AMINOTRANSFERASE 2 | | | | | |
| | 167 | 27 | * | * | ISOFORM 1 OF GRIP AND COILED-COIL | IPI00005631 | LTQ | 0.92 | 2 | 2 |
| | | | | | DOMAIN-CONTAINING PROTEIN 2 | | | | | |
| | 168 | 28 | * | | ISOFORM 1 OF PROBABLE E3 | IPI00333067 | LTQ | 0.97 | 2 | 2 |
| | | | | | UBIQUITIN-PROTEIN LIGASE HERC4 | | | | | |
| | 169 | 29 | * | | ISOFORM 1 OF | IPI00069084 | LTQ | 0.9 | 2 | 3 |
| | | | | | TRANSFORMATION/TRANSCRIPTION | | | | | |
| | | | | | DOMAIN-ASSOCIATED PROTEIN | | | | | |
| | 170 | 30 | * | | Isoform 1 of Uncharacterized protein C9orf84 | IPI00658203 | LTQ | 0.99 | 2 | 4 |
| | 171 | 31 | * | * | ISOFORM 2 OF CROSSOVER JUNCTION | IPI00073193 | LTQ | 0.94 | 2 | 4 |
| | | | | | ENDONUCLEASE EME1 | | | | | |
| | 172 | 32 | * | * | ISOFORM 4 OF NESPRIN-1 | IPI00247295 | LTQ | 0.9 | 3 | 3 |
| | 173 | 33 | * | * | Junctional adhesion molecule A precursor | IPI00001754 | LTQ | 0.99 | 2 | 3 |
| | 174 | 34 | | | KERATIN, TYPE I CYTOSKELETAL 10 | gi\|547749\|sp\|P | LTQ | 1 | 15 | 242 |
| | | | | | (CYTOKERATIN 10) (K10) (CK 10) | | | | | |
| | 175 | 35 | | | KERATIN, TYPE II MICROFIBRILLAR, | gi\|125116\|sp\|P | LTQ | 1 | 3 | 16 |
| | | | | | COMPONENT 7C | | | | | |
| | 176 | 36 | * | * | Mucin 5 (Fragment) | IPI00103397 | LTQ | 0.97 | 2 | 3 |
| | 177 | 37 | | | Myosin-reactive immunoglobulin kappa chain | IPI00384401 | MAL | 0.98 | 2 | 4 |
| | | | | | variable region (Fragment) | | | | | |
| | 178 | 38 | * | * | POTASSIUM/SODIUM | IPI00031506 | LTQ | 0.98 | 2 | 3 |
| | | | | | HYPERPOLARIZATION-ACTIVATED | | | | | |
| | | | | | CYCLIC NUCLEOTIDE-GATED | | | | | |
| | | | | | CHANNEL 1 | | | | | |
| | 179 | 39 | | | ProSAAS precursor | IPI00002280 | LTQ | 0.97 | 2 | 4 |
| | 180 | 40 | * | * | PROTEIN BASSOON | IPI00020153 | LTQ | 0.92 | 2 | 2 |

TABLE 11

| | | | Newly | | | | | Proba- | | |
|---|---|---|---|---|---|---|---|---|---|---|
| | | Sub- | detected | Detected | | | | bility | Number | Total |
| Venn | Total | group | in | in | | | | of | of | number |
| diagram | num- | num- | vitreous | plasma | | IPI accession | | Protein | unique | of |
| location | ber | ber | proteome | proteome | Protein name | number | Method | Prophet | peptides | peptides |
| | 181 | 41 | * | | SIMILAR TO GENERAL TRANSCRIPTION | IPI00736974 | LTQ | 0.97 | 2 | 2 |
| | | | | | FACTOR II-I REPEAT DOMAIN- | | | | | |
| | | | | | CONTAINING PROTEIN 1 (GTF2I REPEAT | | | | | |
| | | | | | DOMAIN-CONTAINING PROTEIN 1) | | | | | |
| | | | | | (MUSCLE TFII-I REPEAT DOMAIN- | | | | | |
| | | | | | CONTAINING PROTEIN 1) (GENERAL | | | | | |
| | | | | | TRANSCRIPTION FACTOR III) (SLOW- | | | | | |
| | | | | | MUSCLE-FIBER ENHANCER BINDING PRO | | | | | |
| | 182 | 42 | * | | Structural maintenance of chromosomes protein | IPI00479260 | LTQ | 1 | 3 | 3 |
| | | | | | 1B | | | | | |
| | 183 | 43 | * | | Thyroid hormone receptor-associated protein 2 | IPI00400834 | LTQ | 0.98 | 2 | 4 |
| | 184 | 44 | * | | UNCHARACTERIZED PROTEIN C22ORF30 | IPI00643747 | LTQ | 1 | 2 | 5 |
| | 185 | 45 | * | * | Utrophin | IPI00009329 | LTQ | 0.99 | 3 | 3 |
| D | 186 | 1 | * | | 12 kDa protein | IPI00790473 | LTQ | 0.99 | 1 | 1 |
| | 187 | 2 | * | | 13 kDa protein | IPI00796830 | LTQ | 0.99 | 1 | 2 |
| | 188 | 3 | * | | 14-3-3 protein zeta/delta | IPI00021263 | LTQ | 0.96 | 1 | 1 |
| | 189 | 4 | * | | 26 kDa protein | IPI00738024 | LTQ | 1 | 4 | 9 |
| | 190 | 5 | * | | 61 kDa protein | IPI00373937 | LTQ | 0.96 | 1 | 1 |
| | 191 | 6 | * | | Acid ceramidase precursor | IPI00013698 | LTQ | 1 | 11 | 15 |
| | 192 | 7 | * | * | Actin, cytoplasmic 1 | IPI00021439 | LTQ | 1 | 9 | 12 |
| | 193 | 8 | * | | ADAMTS-1 precursor | IPI00005908 | LTQ | 1 | 3 | 3 |
| | 194 | 9 | | * | Afamin precursor | IPI00019943 | LTQ | 1 | 25 | 84 |
| | 195 | 10 | * | * | Alpha-2-antiplasmin precursor | IPI00029863 | LTQ | 1 | 18 | 62 |
| | 196 | 11 | | * | Amyloid-like protein 1 precursor | IPI00020012 | LTQ | 1 | 8 | 11 |
| | 197 | 12 | | * | Angiotensinogen precursor | IPI00032220 | MAL | 1 | 35 | 139 |
| | 198 | 13 | * | * | Basement membrane-specific heparan sulfate | IPI00024284 | LTQ | 1 | 28 | 32 |
| | | | | | proteoglycan core protein precursor | | | | | |
| | 199 | 14 | | | Beta crystallin B1 | IPI00216092 | MAL | 1 | 12 | 24 |
| | 200 | 15 | | | Beta crystallin B2 | IPI00218748 | MAL | 1 | 14 | 48 |
| | 201 | 16 | | | Beta crystallin S | IPI00554640 | MAL | 1 | 18 | 37 |
| | 202 | 17 | * | * | biotinidase precursor | IPI00218413 | LTQ | 1 | 9 | 24 |
| | 203 | 18 | | * | Carbonic anhydrase 2 | IPI00218414 | LTQ | 1 | 7 | 8 |
| | 204 | 19 | | | Carboxypeptidase E precursor | IPI00031121 | MAL | 1 | 12 | 20 |
| | 205 | 20 | | | Carboxypeptidase N subunit 2 precursor | IPI00479116 | LTQ | 1 | 5 | 5 |
| | 206 | 21 | | * | Cathepsin D precursor | IPI00011229 | MAL | 1 | 15 | 54 |
| | 207 | 22 | | | Cathepsin L precursor | IPI00012887 | LTQ | 1 | 5 | 5 |
| | 208 | 23 | | * | Cathepsin Z precursor | IPI00002745 | LTQ | 1 | 4 | 4 |
| | 209 | 24 | * | | CDNA FLJ14473 fis, clone MAMMA1001080, | IPI00386879 | LTQ | 1 | 3 | 3 |
| | | | | | highly similar to Homo sapiens SNC73 protein | | | | | |
| | | | | | (SNC73) mRNA | | | | | |
| | 210 | 25 | | * | Coagulation factor XII precursor | IPI00019581 | LTQ | 1 | 7 | 8 |
| | 211 | 26 | | * | Collagen alpha-2(IX) chain precursor | IPI00019088 | LTQ | 1 | 3 | 4 |
| | 212 | 27 | | * | Complement C1q subcomponent subunit C | IPI00022394 | LTQ | 1 | 3 | 4 |
| | | | | | precursor | | | | | |
| | 213 | 28 | | * | Complement C1r subcomponent precursor | IPI00296165 | LTQ | 1 | 7 | 7 |
| | 214 | 29 | | * | Complement C1s subcomponent precursor | IPI00017696 | LTQ | 1 | 9 | 9 |
| | 215 | 30 | | | complement component 1, q subcomponent, B | IPI00477992 | LTQ | 1 | 8 | 11 |
| | | | | | chain precursor | | | | | |
| | 216 | 31 | | * | Complement component C7 precursor | IPI00296608 | LTQ | 1 | 9 | 12 |
| | 217 | 32 | | * | Complement factor D precursor | IPI00019579 | LTQ | 1 | 3 | 3 |
| | 218 | 33 | * | * | Corticosteroid-binding globulin precursor | IPI00027482 | MAL | 1 | 14 | 28 |
| | 219 | 34 | * | * | Dermcidin precursor | IPI00027547 | LTQ | 1 | 3 | 11 |
| | 220 | 35 | * | * | desmocollin 1 isoform Dsc1b preproprotein | IPI00007425 | LTQ | 1 | 3 | 4 |
| | 221 | 36 | * | * | Desmoglein-1 precursor | IPI00025753 | LTQ | 1 | 6 | 7 |
| | 222 | 37 | | | Dickkopf-related protein 3 precursor | IPI00002714 | MAL | 1 | 11 | 40 |
| | 223 | 38 | * | | Dipeptidyl-peptidase 2 precursor | IPI00296141 | LTQ | 1 | 3 | 3 |
| | 224 | 39 | * | * | Endothelial cell-selective adhesion molecule | IPI00303161 | LTQ | 0.94 | 1 | 2 |
| | | | | | precursor | | | | | |
| | 225 | 40 | * | | Epididymal secretory protein E1 precursor | IPI00301579 | LTQ | 1 | 4 | 14 |
| | 226 | 41 | * | * | Extracellular superoxide dismutase [Cu—Zn] | IPI00027827 | LTQ | 1 | 5 | 6 |
| | | | | | precursor | | | | | |
| | 227 | 42 | * | * | Follistatin-related protein 5 precursor | IPI00008087 | LTQ | 1 | 16 | 20 |
| | 228 | 43 | | * | Galectin-3-binding protein precursor | IPI00023673 | LTQ | 1 | 6 | 9 |
| | 229 | 44 | | | Ganglioside GM2 activator precursor | IPI00018236 | LTQ | 0.96 | 1 | 1 |
| | 230 | 45 | * | * | Heparin cofactor 2 precursor | IPI00292950 | LTQ | 1 | 19 | 47 |
| | 231 | 46 | | | HYPOTHETICAL PROTEIN | IPI00550731 | LTQ | 1 | 2 | 3 |
| | 232 | 47 | | | | IPI00784865 | LTQ | 1 | 1 | 1 |
| | 233 | 48 | | | | IPI00784969 | LTQ | 1 | 2 | 6 |
| | 234 | 49 | | | HYPOTHETICAL PROTEIN | IPI00792115 | LTQ | 1 | 1 | 2 |
| | | | | | DKFZP686H17246 | | | | | |
| | 235 | 50 | | | Hypothetical protein LOC196463 | IPI00169285 | LTQ | 1 | 2 | 2 |
| | 236 | 51 | | | Ig kappa chain V-I region BAN | IPI00385555 | LTQ | 1 | 2 | 3 |
| | 237 | 52 | | | Ig kappa chain V-I region Ni | IPI00387106 | LTQ | 0.96 | 1 | 3 |
| | 238 | 53 | | | Ig kappa chain V-II region MIL | IPI00387110 | LTQ | 1 | 4 | 15 |

TABLE 12

| | | | Newly | | | | | Proba- | | |
|---|---|---|---|---|---|---|---|---|---|---|
| | | Sub- | detected | Detected | | | | bility | Number | Total |
| Venn | Total | group | in | in | | | | of | of | number |
| diagram | num- | num- | vitreous | plasma | | IPI accession | | Protein | unique | of |
| location | ber | ber | proteome | proteome | Protein name | number | Method | Prophet | peptides | peptides |
| | 239 | 54 | | | Ig kappa chain V-III region IARC/BL41 | IPI00386131 | LTQ | 0.96 | 1 | 3 |
| | | | | | precursor | | | | | |
| | 240 | 55 | | | Ig kappa chain V-III region NG9 precursor | IPI00387116 | LTQ | 1 | 3 | 9 |
| | | | | | (Fragment) | | | | | |
| | 241 | 56 | | * | IGHA1 PROTEIN | IPI00166866 | MAL | 1 | 1 | 1 |
| | 242 | 57 | | * | IGL@ PROTEIN | IPI00154742 | MAL | 1 | 5 | 9 |
| | 243 | 58 | | | Insulin-like growth factor-binding protein 6 | IPI00029235 | LTQ | 1 | 3 | 3 |
| | | | | | precursor | | | | | |
| | 244 | 59 | | | Insulin-like growth factor-binding protein 7 | IPI00016915 | LTQ | 1 | 6 | 15 |
| | | | | | precursor | | | | | |
| | 245 | 60 | | * | Insulin-like growth factor-binding protein | IPI00020996 | LTQ | 1 | 4 | 8 |
| | | | | | complex acid labile chain precursor | | | | | |
| | 246 | 61 | | | inter-alpha trypsin inhibitor heavy chain | IPI00328829 | LTQ | 1 | 3 | 5 |
| | | | | | precursor 5 isoform 1 | | | | | |
| | 247 | 62 | | | Isoform 1 of Amyloid-like protein 2 precursor | IPI00031030 | LTQ | 1 | 24 | 46 |
| | 248 | 63 | * | * | Isoform 1 of Attractin precursor | IPI00027235 | LTQ | 1 | 16 | 24 |
| | 249 | 64 | * | | Isoform 1 of Cartilage acidic protein 1 | IPI00451624 | LTQ | 1 | 5 | 10 |
| | | | | | precursor | | | | | |
| | 250 | 65 | * | * | Isoform 1 of Contactin-1 precursor | IPI00029751 | LTQ | 1 | 6 | 7 |
| | 251 | 66 | * | * | Isoform 1 of Ectonucleotide | IPI00156171 | LTQ | 1 | 44 | 65 |
| | | | | | pyrophosphatase/phosphodiesterase 2 | | | | | |
| | 252 | 67 | | | Isoform 1 of EGF-containing fibulin-like | IPI00029658 | LTQ | 1 | 6 | 13 |
| | | | | | extracellular matrix protein 1 precursor | | | | | |
| | 253 | 68 | * | * | Isoform 1 of Interleukin-6 receptor subunit beta | IPI00297124 | LTQ | 1 | 3 | 3 |
| | | | | | precursor | | | | | |
| | 254 | 69 | * | * | Isoform 1 of N-acetylmuramoyl-L-alanine | IPI00163207 | LTQ | 1 | 19 | 35 |
| | | | | | amidase precursor | | | | | |
| | 255 | 70 | * | | Isoform 1 of Neuronal cell adhesion molecule | IPI00333776 | LTQ | 1 | 14 | 15 |
| | | | | | precursor | | | | | |
| | 256 | 71 | * | * | Isoform 1 of Pappalysin-2 precursor | IPI00013569 | LTQ | 1 | 16 | 17 |
| | 257 | 72 | * | * | Isoform 1 of Sex hormone-binding globulin | IPI00023019 | LTQ | 1 | 9 | 16 |
| | | | | | precursor | | | | | |
| | 258 | 73 | * | | Isoform 1 of Target of Nesh-SH3 precursor | IPI00440822 | LTQ | 1 | 16 | 26 |
| | 259 | 74 | * | | Isoform 1 of Tenascin precursor | IPI00031008 | LTQ | 1 | 6 | 8 |
| | 260 | 75 | * | | Isoform 1 of Tripeptidyl-peptidase 1 precursor | IPI00298237 | LTQ | 1 | 6 | 11 |
| | 261 | 76 | * | | Isoform 1 of VPS10 domain-containing | IPI00103597 | LTQ | 1 | 3 | 6 |
| | | | | | receptor SorCS1 precursor | | | | | |
| | 262 | 77 | | | Isoform 2 of Apolipoprotein-L1 precursor | IPI00186903 | LTQ | 1 | 6 | 9 |
| | 263 | 78 | * | * | Isoform 2 of Neural cell adhesion molecule L1- | IPI00299059 | LTQ | 1 | 11 | 11 |
| | | | | | like protein precursor | | | | | |
| | 264 | 79 | * | * | Isoform 2 of Reelin precursor | IPI00241562 | LTQ | 1 | 2 | 2 |
| | 265 | 80 | | | Isoform A of Osteopontin precursor | IPI00021000 | LTQ | 1 | 2 | 5 |
| | 266 | 81 | * | | Isoform A of Protein CutA precursor | IPI00034319 | LTQ | 1 | 3 | 5 |
| | 267 | 82 | | | Isoform A3 of Beta crystallin A3 | IPI00010847 | LTQ | 1 | 10 | 16 |
| | 268 | 83 | | * | Isoform APP770 of Amyloid beta A4 protein | IPI00006608 | LTQ | 1 | 13 | 33 |
| | | | | | precursor (Fragment) | | | | | |
| | 269 | 84 | | | Isoform B of Fibulin-1 precursor | IPI00218803 | LTQ | 1 | 4 | 4 |
| | 270 | 85 | | * | Isoform DPI of Desmoplakin | IPI00013933 | LTQ | 1 | 9 | 15 |
| | 271 | 86 | * | * | Isoform N-CAM 120 of Neural cell adhesion | IPI00220737 | LTQ | 1 | 5 | 8 |
| | | | | | molecule 1, 120 kDa isoform precursor | | | | | |
| | 272 | 87 | * | | Isoform Short of Receptor-type tyrosine-protein | IPI00216283 | LTQ | 1 | 5 | 8 |
| | | | | | phosphatase zeta precursor | | | | | |
| | 273 | 88 | * | | Isoform V0 of Versican core protein precursor | IPI00009802 | LTQ | 1 | 9 | 27 |
| | 274 | 89 | * | | Junction plakoglobin | IPI00554711 | LTQ | 1 | 5 | 6 |
| | 275 | 90 | | | K12 keratin [Homo sapiens] | gi\|2497269\|sp\| | LTQ | 1 | 2 | 4 |
| | 276 | 91 | | | keratin 10, type I, epidermal - human | gi\|88041\|pir\|\| | LTQ | 1 | 51 | 424 |
| | | | | | | A31994 | | | | |
| | 277 | 92 | | * | Keratin 6 irs3 | IPI00174775 | LTQ | 1 | 3 | 7 |
| | 278 | 93 | | | Keratin 77 | IPI00376379 | LTQ | 1 | 4 | 24 |
| | 279 | 94 | | | keratin K5, 58K type II, epidermal | gi\|88052\|pir\|\| | LTQ | 1 | 3 | 9 |
| | | | | | (version 2) - human (fragment) | A32568 | | | | |
| | 280 | 95 | | | Keratin, type I cytoskeletal 14 | IPI00384444 | LTQ | 1 | 25 | 61 |
| | 281 | 96 | | * | Keratin, type I cytoskeletal 9 | IPI00019359 | MAL | 1 | 12 | 21 |
| | 282 | 97 | | | KERATIN, TYPE II CYTOSKELETAL 5 | gi\|125105\|sp\|P | LTQ | 1 | 6 | 9 |
| | | | | | (CYTOKERATIN 5) (K5) (CK 5) (58 KD | | | | | |
| | | | | | CYTOKERATIN) | | | | | |
| | 283 | 98 | | | Keratin-78 | IPI00166205 | LTQ | 1 | 3 | 4 |
| | 284 | 99 | * | * | Low-density lipoprotein receptor-related | IPI00020557 | LTQ | 1 | 4 | 4 |
| | | | | | protein 1 precursor | | | | | |
| | 285 | 100 | * | * | Low-density lipoprotein receptor-related | IPI00024292 | LTQ | 1 | 9 | 20 |
| | | | | | protein 2 precursor | | | | | |
| | 286 | 101 | | * | Lumican precursor | IPI00020986 | LTQ | 1 | 9 | 40 |
| | 287 | 102 | | * | Lysozyme C precursor | IPI00019038 | LTQ | 1 | 3 | 5 |
| | 288 | 103 | | | Metalloproteinase inhibitor 2 precursor | IPI00027166 | LTQ | 1 | 4 | 5 |
| | 289 | 104 | * | * | Monocyte differentiation antigen CD14 | IPI00029260 | LTQ | 1 | 15 | 29 |
| | | | | | precursor | | | | | |
| | 290 | 105 | | | Myosin-reactive immunoglobulin light chain | IPI00384399 | LTQ | 0.96 | 1 | 1 |
| | | | | | variable region (Fragment) | | | | | |
| | 291 | 106 | * | | N(4)-(beta-N-acetylglucosaminyl)-L- | IPI00026259 | LTQ | 1 | 2 | 3 |
| | | | | | asparaginase [Precursor] | | | | | |
| | 292 | 107 | * | | N-acetyllactosaminide beta-1,3-N- | IPI00009997 | MAL | 1 | 9 | 11 |
| | | | | | acetylglucosaminyltransferase | | | | | |
| | 293 | 108 | * | * | Neuroserpin precursor | IPI00016150 | LTQ | 1 | 6 | 8 |
| | 294 | 109 | | | Opticin precursor | IPI00002678 | MAL | 1 | 11 | 22 |
| | 295 | 110 | * | | Palmitoyl-protein thioesterase 1 precursor | IPI00002412 | LTQ | 1 | 3 | 3 |
| | 296 | 111 | * | * | phosphatidylethanolamine-binding protein 4 | IPI00163563 | LTQ | 1 | 4 | 5 |
| | 297 | 112 | * | * | Prolactin-inducible protein precursor | IPI00022974 | LTQ | 1 | 2 | 2 |
| | 298 | 113 | * | | Protein CREG1 precursor | IPI00021997 | LTQ | 1 | 2 | 2 |

TABLE 13

| | | | Newly | | | | | Proba- | | |
|---|---|---|---|---|---|---|---|---|---|---|
| | | Sub- | detected | Detected | | | | bility | Number | Total |
| Venn | Total | group | in | in | | | | of | of | number |
| diagram | num- | num- | vitreous | plasma | | IPI accession | | Protein | unique | of |
| location | ber | ber | proteome | proteome | Protein name | number | Method | Prophet | peptides | peptides |
| | 299 | 114 | | | Protein FAM3C precursor | IPI00021923 | LTQ | 1 | 6 | 19 |
| | 300 | 115 | * | | Protein OAF homolog | IPI00328703 | MAL | 1 | 3 | 9 |
| | 301 | 116 | * | * | Protein S100-A8 | IPI00007047 | LTQ | 0.94 | 1 | 1 |
| | 302 | 117 | | * | Prothrombin precursor (Fragment) | IPI00019568 | LTQ | 1 | 29 | 74 |
| | 303 | 118 | | | Retinoschisin precursor | IPI00007331 | LTQ | 1 | 9 | 22 |
| | 304 | 119 | * | | Ribonuclease pancreatic precursor | IPI00014048 | LTQ | 0.96 | 1 | 2 |
| | 305 | 120 | * | * | Secretogranin-3 precursor | IPI00292071 | LTQ | 0.96 | 1 | 2 |
| | 306 | 121 | * | * | seizure related 6 homolog | IPI00154734 | LTQ | 1 | 11 | 19 |
| | 307 | 122 | * | | Semaphorin-7A precursor | IPI00025257 | LTQ | 1 | 6 | 9 |
| | 308 | 123 | * | * | similar to hephaestin isoform 1 | IPI00261031 | LTQ | 1 | 4 | 6 |
| | 309 | 124 | * | | similar to Plexin-B2 precursor | IPI00398435 | LTQ | 1 | 7 | 7 |
| | 310 | 125 | * | * | SPARC precursor | IPI00014572 | LTQ | 1 | 5 | 6 |
| | 311 | 126 | * | | SPARC-like protein 1 precursor | IPI00296777 | LTQ | 1 | 5 | 10 |
| | 312 | 127 | | | Spondin-1 precursor | IPI00171473 | LTQ | 1 | 21 | 38 |
| | 313 | 128 | * | * | Tau-tubulin kinase | IPI00217437 | LTQ | 0.99 | 2 | 18 |
| | 314 | 129 | * | | type 1 tumor necrosis factor receptor shedding | IPI00165949 | LTQ | 1 | 3 | 3 |
| | | | | | aminopeptidase regulator isoform a | | | | | |
| | 315 | 130 | | | type I keratin 16 - human | gi\|1363944\|pir | LTQ | 1 | 25 | 55 |
| | 316 | 131 | | * | Type I transmembrane receptor precursor | IPI00018276 | LTQ | 1 | 5 | 5 |
| | 317 | 132 | | | TYPE II CYTOSKELETAL 2 EPIDERMAL | gi\|547754\|sp\|P | LTQ | 1 | 32 | 165 |
| | | | | | (CYTOKERATIN 2E) (K2E) (CK 2E) | | | | | |
| | 318 | 133 | * | | Vasorin precursor | IPI00395488 | LTQ | 1 | 4 | 7 |
| | 319 | 134 | * | | Vesicular integral-membrane protein VIP36 | IPI00009950 | LTQ | 1 | 7 | 8 |
| | | | | | precursor | | | | | |
| | 320 | 135 | | | vitamin D-binding protein precursor | IPI00555812 | MAL | 1 | 16 | 43 |
| | 321 | 136 | | * | Vitamin K-dependent protein C precursor | IPI00021817 | LTQ | 0.96 | 1 | 1 |
| | 322 | 137 | | * | Vitamin K-dependent protein S precursor | IPI00294004 | LTQ | 0.96 | 1 | 2 |
| | 323 | 138 | * | | Wnt inhibitory factor 1 precursor | IPI00001863 | MAL | 1 | 22 | 69 |
| E | 324 | 1 | * | * | 187 kDa protein | IPI00164623 | MAL | 1 | 137 | 865 |
| | 325 | 2 | * | | 26 kDa protein | IPI00480016 | MAL | 1 | 2 | 64 |
| | 326 | 3 | | * | ALB protein | IPI00022434 | MAL | 1 | 36 | 283 |
| | 327 | 4 | | | Alpha crystallin A chain | IPI00021062 | LTQ | 1 | 12 | 41 |
| | 328 | 5 | | * | Alpha-1-acid glycoprotein 1 precursor | IPI00022429 | MAL | 1 | 48 | 509 |
| | 329 | 6 | | * | Alpha-1-acid glycoprotein 2 precursor | IPI00020091 | MAL | 1 | 30 | 186 |
| | 330 | 7 | | | Alpha-1-antitrypsin precursor | IPI00553177 | MAL | 1 | 131 | 2750 |
| | 331 | 8 | | * | Alpha-1B-glycoprotein precursor | IPI00022895 | MAL | 1 | 39 | 192 |
| | 332 | 9 | | * | alpha-2-glycoprotein 1, zinc | IPI00166729 | MAL | 1 | 8 | 135 |
| | 333 | 10 | | * | Alpha-2-HS-glycoprotein precursor | IPI00022431 | MAL | 1 | 20 | 93 |
| | 334 | 11 | | | Alpha-2-macroglobulin precursor | IPI00478003 | MAL | 1 | 204 | 1195 |
| | 335 | 12 | | * | AMBP protein precursor | IPI00022426 | MAL | 1 | 27 | 125 |
| | 336 | 13 | | * | ANTITHROMBIN III VARIANT | IPI00032179 | MAL | 1 | 54 | 376 |
| | 337 | 14 | | * | Apolipoprotein A-I precursor | IPI00021841 | MAL | 1 | 77 | 499 |
| | 338 | 15 | | * | Apolipoprotein A-II precursor | IPI00021854 | MAL | 1 | 12 | 29 |
| | 339 | 16 | | * | Apolipoprotein A-IV precursor | IPI00304273 | MAL | 1 | 21 | 257 |
| | 340 | 17 | | * | APOLIPOPROTEIN D PRECURSOR. | IPI00006662 | LTQ | 1 | 5 | 18 |
| | 341 | 18 | | * | Apolipoprotein E precursor | IPI00021842 | MAL | 1 | 18 | 363 |
| | 342 | 19 | | * | Beta-2-glycoprotein 1 precursor | IPI00298828 | MAL | 1 | 7 | 98 |
| | 343 | 20 | | * | Beta-2-microglobulin precursor | IPI00004656 | MAL | 1 | 5 | 51 |
| | 344 | 21 | * | * | calsyntenin 1 isoform 2 | IPI00007257 | MAL | 1 | 38 | 76 |
| | 345 | 22 | | * | Carbonic anhydrase 1 | IPI00215983 | LTQ | 1 | 15 | 56 |
| | 346 | 23 | | * | Ceruloplasmin precursor | IPI00017601 | MAL | 1 | 147 | 809 |
| | 347 | 24 | | | Chitinase-3-like protein 1 precursor | IPI00002147 | MAL | 1 | 14 | 23 |
| | 348 | 25 | | * | Clusterin precursor | IPI00291262 | MAL | 1 | 75 | 432 |
| | 349 | 26 | | * | Complement C2 precursor (Fragment) | IPI00303963 | LTQ | 1 | 4 | 36 |
| | 350 | 27 | | * | Complement C5 precursor | IPI00032291 | LTQ | 1 | 12 | 14 |
| | 351 | 28 | | | complement component 4B preproprotein | IPI00418163 | MAL | 1 | 10 | 56 |
| | 352 | 29 | | * | Complement component C6 precursor | IPI00009920 | LTQ | 1 | 16 | 28 |
| | 353 | 30 | | * | Complement component C8 gamma chain | IPI00011261 | LTQ | 1 | 7 | 10 |
| | | | | | precursor | | | | | |
| | 354 | 31 | | * | Complement component C9 precursor | IPI00022395 | LTQ | 1 | 20 | 59 |
| | 355 | 32 | | * | Complement factor I precursor | IPI00291867 | MAL | 1 | 7 | 38 |
| | 356 | 33 | | * | Cystatin-C precursor | IPI00032293 | MAL | 1 | 29 | 138 |
| | 357 | 34 | | | cytokeratin 9 [Homo sapiens] | gi\|1082558\|pir | LTQ | 1 | 37 | 324 |
| | 358 | 35 | | * | Glutathione peroxidase 3 precursor | IPI00026199 | MAL | 1 | 28 | 102 |
| | 359 | 36 | | | Hemoglobin subunit alpha | IPI00410714 | MAL | 1 | 15 | 313 |
| | 360 | 37 | | | Hemoglobin subunit beta | IPI00654755 | MAL | 1 | 11 | 248 |

TABLE 14

| | | | Newly | | | | | Proba- | | |
|---|---|---|---|---|---|---|---|---|---|---|
| | | Sub- | detected | Detected | | | | bility | Number | Total |
| Venn | Total | group | in | in | | | | of | of | number |
| diagram | num- | num- | vitreous | plasma | | IPI accession | | Protein | unique | of |
| location | ber | ber | proteome | proteome | Protein name | number | Method | Prophet | peptides | peptides |
| | 361 | 38 | | | Hemoglobin subunit delta | IPIM0473011 | MAL | 1 | 4 | 60 |
| | 362 | 39 | | * | Hemopexin precursor | IPI00022488 | MAL | 1 | 72 | 842 |
| | 363 | 40 | | * | Histidine-rich glycoprotein precursor | IPI00022371 | MAL | 1 | 11 | 28 |
| | 364 | 41 | | | HP protein | IPI00431645 | MAL | 1 | 10 | 16 |
| | 365 | 42 | | | Ig kappa chain V-I region DEE | IPI00387025 | LTQ | 1 | 3 | 54 |
| | 366 | 43 | | | Ig kappa chain V-III region B6 | IPI00387113 | LTQ | 1 | 2 | 7 |
| | 367 | 44 | | | IG KAPPA CHAIN V-III REGION | IPI00784669 | LTQ | 1 | 2 | 43 |
| | | | | | HAH PRECURSOR | | | | | |
| | 368 | 45 | | | IG KAPPA CHAIN V-IV REGION | IPI00387120 | MAL | 0.94 | 4 | 9 |
| | | | | | LEN | | | | | |
| | 369 | 46 | | * | IgGFc-binding protein precursor | IPI00242956 | LTQ | 1 | 32 | 68 |
| | 370 | 47 | | | IGHM PROTEIN | IPI00472610 | LTQ | 1 | 4 | 23 |
| | 371 | 48 | | | IGKC PROTEIN | IPI00430847 | LTQ | 1 | 4 | 36 |
| | 372 | 49 | | | | IPI00746963 | LTQ | 1 | 3 | 37 |
| | 373 | 50 | | | | IPI00807413 | LTQ | 1 | 3 | 39 |
| | 374 | 51 | | | IGKV2-24 protein | IPI00440577 | LTQ | 1 | 1 | 14 |
| | 375 | 52 | | * | Inter-alpha-trypsin inhibitor heavy | IPI00292530 | MAL | 1 | 46 | 155 |
| | | | | | chain H1 precursor | | | | | |
| | 376 | 53 | | * | Inter-alpha-trypsin inhibitor heavy | IPI00305461 | MAL | 1 | 42 | 170 |
| | | | | | chain H2 precursor | | | | | |
| | 377 | 54 | | | Interphotoreceptor retinoid-binding | IPI00022337 | MAL | 1 | 198 | 836 |
| | | | | | protein precursor | | | | | |
| | 378 | 55 | | | Isoform 1 of Alpha-1- | IPI00550991 | MAL | 1 | 68 | 568 |
| | | | | | antichymotrypsin precursor | | | | | |
| | 379 | 56 | | * | Isoform 1 of Complement factor B | IPI00019591 | MAL | 1 | 46 | 165 |
| | | | | | precursor (Fragment) | | | | | |
| | 380 | 57 | | * | Isoform 1 of Complement factor H | IPI00029739 | MAL | 1 | 11 | 27 |
| | | | | | precursor | | | | | |
| | 381 | 58 | | * | Isoform 1 of Fibrinogen alpha chain | IPI00021885 | MAL | 1 | 25 | 96 |
| | | | | | precursor | | | | | |
| | 382 | 59 | | * | Isoform 1 of Gelsolin precursor | IPI00026314 | MAL | 1 | 20 | 177 |
| | 383 | 60 | | * | Isoform 2 of Inter-alpha-trypsin | IPI00218192 | MAL | 1 | 12 | 163 |
| | | | | | inhibitor heavy chain H4 precursor | | | | | |
| | 384 | 61 | | * | Isoform Gamma-B of Fibrinogen | IPI00021891 | MAL | 1 | 29 | 131 |
| | | | | | gamma chain precursor | | | | | |
| | 385 | 62 | | * | Isoform LMW of Kininogen-1 | IPI00215894 | MAL | 1 | 25 | 109 |
| | | | | | precursor | | | | | |
| | 386 | 63 | | | keratin, 67K type II cytoskeletal - | gi\|88054\|pir\|\| | LTQ | 1 | 27 | 230 |
| | | | | | human | A22940 | | | | |
| | 387 | 64 | | | Keratin, type I cytoskeletal 10 | IPI00009865 | MAL | 1 | 7 | 20 |
| | 388 | 65 | | | KERATIN, TYPE I | gi\|547748\|sp\| | LTQ | 1 | 36 | 323 |
| | | | | | CYTOSKELETAL 9 | P35527\|K1CI_HUMAN | | | | |
| | | | | | (CYTOKERATIN 9) (K9) (CK 9) | | | | | |
| | 389 | 66 | | * | Keratin, type II cytoskeletal 1 | IPI00220327 | MAL | 1 | 14 | 75 |
| | 390 | 67 | | * | Leucine-rich alpha-2-glycoprotein | IPI00022417 | MAL | 1 | 18 | 48 |
| | | | | | precursor | | | | | |
| | 391 | 68 | | | Promega trypsin artifact 5K to | Trypa5\|PromTArt5 | LTQ | 1 | 58 | 629 |
| | | | | | R mods (2239.1, 2914)(1987, 2003) | | | | | |
| | 392 | 69 | | * | Pigment epithelium-derived factor | IPI00006114 | MAL | 1 | 62 | 308 |
| | | | | | precursor | | | | | |
| | 393 | 70 | | * | Plasma protease C1 inhibitor | IPI00291866 | MAL | 1 | 17 | 309 |
| | | | | | precursor | | | | | |
| | 394 | 71 | | * | Plasma retinol-binding protein | IPI00022420 | MAL | 1 | 36 | 497 |
| | | | | | precursor | | | | | |
| | 395 | 72 | | * | Plasma serine protease inhibitor | IPI00007221 | LTQ | 1 | 2 | 5 |
| | | | | | precursor | | | | | |
| | 396 | 73 | | * | Plasminogen precursor | IPI00019580 | MAL | 1 | 11 | 103 |
| | 397 | 74 | | * | Prostaglandin-H2 D-isomerase | IPI00013179 | MAL | 1 | 32 | 284 |
| | | | | | precursor | | | | | |
| | 398 | 75 | | * | Serotransferrin precursor | IPI00022463 | MAL | 1 | 234 | 4234 |
| | 399 | 76 | | | SERUM ALBUMIN PRECURSOR | gi\|113576\|sp\|P | LTQ | 1 | 116 | 8808 |
| | 400 | 77 | | * | Serum amyloid A-4 protein precursor | IPI00019399 | LTQ | 1 | 5 | 8 |
| | 401 | 78 | * | * | Serum paraoxonase/arylesterase 1 | IPI00218732 | LTQ | 1 | 11 | 36 |
| | 402 | 79 | | * | Tetranectin precursor | IPI00009028 | LTQ | 1 | 7 | 18 |
| | 403 | 80 | | * | Transthyretin precursor | IPI00022432 | MAL | 1 | 66 | 872 |
| | 404 | 81 | | | Trypsin precursor | gi\|136429\|sp\| | LTQ | 1 | 15 | 1439 |
| | | | | | | P00761\|TRYP_PIG | | | | |
| | 405 | 82 | | | TYPE II CYTOSKELETAL 1 | gi\|1346343\|sp\| | LTQ | 1 | 49 | 408 |
| | | | | | (CYTOKERATIN 1) (K1) | | | | | |
| | | | | | (CK 1) (67 KD CYTOKERATIN) | | | | | |
| | | | | | (HAIR ALPHA PROTEIN) | | | | | |
| | 406 | 83 | | | type II keratin subunit protein | gi\|715326\|pir\|\| | LTQ | 1 | 2 | 7 |
| | | | | | [Homo sapiens] | KRHU2 | | | | |
| | 407 | 84 | | | vitamin D-binding protein precursor | IPI00742696 | LTQ | 1 | 74 | 537 |
| | 408 | 85 | | * | Vitronectin precursor | IPI00298971 | MAL | 1 | 17 | 85 |
| F | 409 | 1 | | | albumin | gi\|229552\|BSA\|\| | LTQ | 1 | 15 | 205 |
| | | | | | | 754920A | | | | |
| | 410 | 2 | | | COMPLEMENT COMPONENT 4A | IPI00643525 | LTQ | 1 | 124 | 431 |
| | 411 | 3 | | | Hypothetical protein | IPI00384938 | MAL | 1 | 2 | 8 |
| | | | | | DKFZp686N02209 | | | | | |
| | 412 | 4 | | | Hypothetical protein LOC649897 | IPI00736860 | LTQ | 1 | 3 | 59 |
| | 413 | 5 | | | IG KAPPA CHAIN V-III REGION | IPI00385253 | LTQ | 1 | 3 | 71 |
| | | | | | CLL PRECURSOR | | | | | |
| | 414 | 6 | | | Ig kappa chain V-III region SIE | IPI00387115 | MAL | 1 | 1 | 2 |
| | 415 | 7 | | | Isoform 2 of Titin | IPI00023283 | LTQ | 1 | 9 | 27 |
| G | 416 | 1 | | | (X90763) HHa5 hair keratin type I | gi\|1668744\|gn [symbol] | LTQ | 1 | 5 | 6 |
| | | | | | intermediate filament [Homo sapiens] | | | | | |
| | 417 | 2 | * | | 106 kDa protein | IPI00293088 | LTQ | 0.95 | 1 | 1 |
| | 418 | 3 | * | | 12 kDa protein | IPI00478441 | LTQ | 0.94 | 1 | 4 |
| | 419 | 4 | * | | 261 KDA PROTEIN | IPI00791343 | LTQ | 1 | 4 | 4 |
| | 420 | 5 | * | * | 31 KDA PROTEIN | IPI00166417 | LTQ | 0.95 | 1 | 1 |
| | 421 | 6 | * | | 53 kDa protein | IPI00020430 | LTQ | 0.96 | 1 | 2 |
| | 422 | 7 | * | * | 72 kDa type IV collagenase precursor | IPI00027780 | LTQ | 0.96 | 1 | 1 |
| | 423 | 8 | * | | Agrin precursor | IPI00374563 | LTQ | 1 | 13 | 13 |

[symbol]

indicates data missing or illegible when filed

TABLE 15

| | | | Newly | | | | | Proba- | | |
|---|---|---|---|---|---|---|---|---|---|---|
| | | Sub- | detected | Detected | | | | bility | Number | Total |
| Venn | Total | group | in | in | | | | of | of | number |
| diagram | num- | num- | vitreous | plasma | | IPI accession | | Protein | unique | of |
| location | ber | ber | proteome | proteome | Protein name | number | Method | Prophet | peptides | peptides |
| | 424 | 9 | | | albumin [Bos primigenius taurus] | gi\|229552\|prf\|\| | LTQ | 0.96 | 1 | 1 |
| | | | | | | 754920A | | | | |
| | 425 | 10 | * | | Alcadein beta | IPI00396423 | LTQ | 0.96 | 1 | 1 |
| | 426 | 11 | * | | Alpha-mannosidase 2 | IPI00003802 | LTQ | 0.96 | 1 | 1 |
| | 427 | 12 | * | | Alpha-N-acetylgalactosaminidase precursor | IPI00414909 | LTQ | 0.96 | 1 | 1 |
| | 428 | 13 | | | Angiogenin precursor | IPI00008554 | LTQ | 0.95 | 1 | 1 |
| | 429 | 14 | | | ANTI-RHD MONOCLONAL T125 | IPI00784817 | LTQ | 0.93 | 1 | 1 |
| | | | | | GAMMA1 HEAVY CHAIN PRECURSOR | | | | | |
| | 430 | 15 | * | | Beta-1,3-N-acetylglucosaminyltransferase | IPI00001793 | LTQ | 0.96 | 1 | 1 |
| | | | | | radical fringe | | | | | |
| | 431 | 16 | | | VATVSLPR 422 ion wrongly assigned z = 3 | Trypa6\|TrypArt6 | LTQ | 0.99 | 2 | 9 |
| | | | | | (1262.8) (llhg are dummy aa's) | | | | | |
| | 432 | 17 | | * | C3 and PZP-like, alpha-2-macroglobulin | IPI00291807 | LTQ | 1 | 5 | 10 |
| | | | | | domain containing 8 | | | | | |
| | 433 | 18 | | * | Cadherin-2 precursor | IPI00290085 | LTQ | 1 | 5 | 7 |
| | 434 | 19 | | | Calsyntenin-2 precursor | IPI00005491 | LTQ | 0.96 | 1 | 1 |
| | 435 | 20 | | * | Carbonic anhydrase-related protein 10 | IPI00024601 | LTQ | 1 | 2 | 2 |
| | 436 | 21 | * | * | Caspase-14 precursor | IPI00013885 | LTQ | 1 | 2 | 2 |
| | 437 | 22 | | | Cathepsin B precursor | IPI00295741 | LTQ | 1 | 3 | 7 |
| | 438 | 23 | * | | CDNA FLJ45402 fis, clone BRHIP3029409, | IPI00384783 | LTQ | 0.92 | 1 | 1 |
| | | | | | moderately similar to Homo sapiens secreted | | | | | |
| | | | | | frizzled-related protein 1 | | | | | |
| | 439 | 24 | * | | Chromogranin A precursor | IPI00290315 | LTQ | 1 | 2 | 5 |
| | 440 | 25 | | * | Coagulation factor V | IPI00022937 | LTQ | 1 | 6 | 6 |
| | 441 | 26 | | | collagen, type VI, alpha 1 precursor | IPI00719088 | LTQ | 1 | 7 | 7 |
| | 442 | 27 | | | complement factor H-related 1 | IPI00167093 | LTQ | 1 | 2 | 4 |
| | 443 | 28 | | | Cystatin-SN precursor | IPI00305477 | LTQ | 1 | 2 | 2 |
| | 444 | 29 | * | | Deoxyribonuclease-2-alpha precursor | IPI00010348 | LTQ | 1 | 2 | 3 |
| | 445 | 30 | * | | DIS3 MITOTIC CONTROL HOMOLOG | IPI00291003 | LTQ | 0.91 | 2 | 2 |
| | | | | | (S. CEREVISIAE)-LIKE | | | | | |
| | 446 | 31 | * | * | EXTL2 protein (Fragment) | IPI00002732 | LTQ | 0.95 | 1 | 1 |
| | 447 | 32 | * | * | Extracellular matrix protein 1 precursor | IPI00003351 | LTQ | 0.95 | 1 | 1 |
| | 448 | 33 | * | * | Full-length cDNA clone CS0DL004YM19 of | IPI00328493 | LTQ | 1 | 4 | 8 |
| | | | | | B cells (Ramos cell line) of Homo sapiens | | | | | |
| | | | | | (Fragment) | | | | | |
| | 449 | 34 | * | * | Glucosidase 2 subunit beta precursor | IPI00026154 | LTQ | 1 | 2 | 2 |
| | 450 | 35 | * | * | Glutaminyl-peptide cyclotransferase | IPI00003919 | LTQ | 1 | 3 | 3 |
| | | | | | precursor | | | | | |
| | 451 | 36 | * | * | Histatin-1 precursor | IPI00012024 | LTQ | 0.92 | 1 | 1 |
| | 452 | 37 | * | | Histone H4 | IPI00453473 | LTQ | 1 | 3 | 3 |
| | 453 | 38 | | | HP protein | IPI00478493 | LTQ | 1 | 32 | 68 |
| | 454 | 39 | | | HYPOTHETICAL PROTEIN | IPI00784807 | LTQ | 1 | 4 | 5 |
| | 455 | 40 | | | HYPOTHETICAL PROTEIN | IPI00426051 | LTQ | 1 | 1 | 1 |
| | | | | | DKFZP686C15213 | | | | | |
| | 456 | 41 | | | HYPOTHETICAL PROTEIN | IPI00784842 | MAL | 1 | 3 | 10 |
| | | | | | DKFZP686G11190 | | | | | |
| | 457 | 42 | | | HYPOTHETICAL PROTEIN | IPI00418153 | LTQ | 1 | 2 | 9 |
| | | | | | DKFZP686I15212 | | | | | |
| | 458 | 43 | | | HYPOTHETICAL PROTEIN | IPI00784998 | MAL | 1 | 3 | 8 |
| | | | | | DKFZP686M24218 | | | | | |
| | 459 | 44 | | | HYPOTHETICAL PROTEIN | IPI00645363 | LTQ | 1 | 3 | 10 |
| | | | | | DKFZP686P15220 | | | | | |
| | 460 | 45 | | | Ig heavy chain V-II region WAH | IPI00382539 | LTQ | 0.93 | 1 | 1 |
| | 461 | 46 | | | IG KAPPA CHAIN V-I REGION SCW | IPI00387101 | LTQ | 0.96 | 2 | 3 |
| | 462 | 47 | | | IG KAPPA CHAIN V-II REGION FR | IPI00387109 | LTQ | 1 | 2 | 2 |
| | 463 | 48 | | | IG KAPPA CHAIN V-III REGION GOL | IPI00385252 | MAL | 1 | 2 | 5 |
| | 464 | 49 | | | IGHG1 PROTEIN | IPI00784810 | LTQ | 0.95 | 1 | 1 |
| | 465 | 50 | | | IGHG4 protein | IPI00550640 | LTQ | 1 | 4 | 16 |
| | 466 | 51 | | | IGKC PROTEIN | IPI00784070 | LTQ | 1 | 1 | 1 |
| | 467 | 52 | | | IGL@ PROTEIN | IPI00719373 | LTQ | 1 | 2 | 27 |
| | 468 | 53 | | | Immunglobulin heavy chain variable region | IPI00745363 | LTQ | 0.96 | 1 | 1 |
| | | | | | (Fragment) | | | | | |
| | 469 | 54 | | * | Isoform 1 of Collagen alpha-1(IX) chain | IPI00294640 | LTQ | 0.96 | 1 | 1 |
| | | | | | precursor | | | | | |
| | 470 | 55 | * | * | Isoform 1 of Contactin-associated protein- | IPI00029343 | LTQ | 0.96 | 1 | 1 |
| | | | | | like 2 precursor | | | | | |
| | 471 | 56 | * | | Isoform 1 of Follistatin-related protein 4 | IPI00477747 | LTQ | 1 | 4 | 5 |
| | | | | | precursor | | | | | |
| | 472 | 57 | * | * | Isoform 1 of L-lactate dehydrogenase | IPI00217966 | LTQ | 1 | 2 | 2 |
| | | | | | A chain | | | | | |
| | 473 | 58 | * | * | Isoform 1 of Neogenin precursor | IPI00023814 | LTQ | 1 | 2 | 2 |
| | 474 | 59 | * | | Isoform 1 of Neural cell adhesion | IPI00027087 | LTQ | 1 | 2 | 3 |
| | | | | | molecule L1 precursor | | | | | |
| | 475 | 60 | * | | Isoform 1 of Neurexin-2-alpha precursor | IPI00007921 | LTQ | 1 | 2 | 2 |
| | 476 | 61 | * | | Isoform 1 of Peptidyl-glycine alpha- | IPI00177543 | LTQ | 0.96 | 1 | 1 |
| | | | | | amidating monooxygenase precursor | | | | | |
| | 477 | 62 | * | * | Isoform 1 of Receptor-type tyrosine-protein | IPI00011642 | LTQ | 0.96 | 1 | 1 |
| | | | | | phosphatase delta precursor | | | | | |
| | 478 | 63 | * | * | Isoform 1 of Sulfhydryl oxidase 1 precursor | IPI00003590 | LTQ | 1 | 8 | 9 |
| | 479 | 64 | * | * | Isoform 1 of Tenascin-R precursor | IPI00160552 | LTQ | 1 | 5 | 10 |
| | 480 | 65 | | * | Isoform 2 of Collagen alpha-1(XVIII) chain | IPI00022822 | LTQ | 1 | 5 | 8 |
| | | | | | precursor | | | | | |
| | 481 | 66 | * | | Isoform 2 of Neurexin-3-alpha precursor | IPI00441515 | LTQ | 1 | 9 | 11 |
| | 482 | 67 | * | | Isoform 2 of Phospholipid transfer protein | IPI00217778 | LTQ | 1 | 7 | 7 |
| | | | | | precursor | | | | | |
| | 483 | 68 | * | | Isoform 2 of Testican-3 precursor | IPI00419590 | LTQ | 1 | 2 | 2 |
| | 484 | 69 | * | | Isoform 2 of Triosephosphate isomerase | IPI00451401 | LTQ | 0.9 | 1 | 1 |

TABLE 16

| | | | Newly | | | | | Proba- | | |
|---|---|---|---|---|---|---|---|---|---|---|
| | | Sub- | detected | Detected | | | | bility | Number | Total |
| Venn | Total | group | in | in | | | | of | of | number |
| diagram | num- | num- | vitreous | plasma | | IPI accession | | Protein | unique | of |
| location | ber | ber | proteome | proteome | Protein name | number | Method | Prophet | peptides | peptides |
| | 485 | 70 | * | | Isoform 4 of Seizure 6-like protein | IPI00157417 | LTQ | 1 | 4 | 4 |
| | | | | | precursor | | | | | |
| | 486 | 71 | | * | Isoform C of Fibulin-1 precursor | IPI00296537 | LTQ | 1 | 3 | 3 |
| | 487 | 72 | * | | Isoform Long of Alpha-mannosidase | IPI00027703 | LTQ | 1 | 3 | 3 |
| | | | | | IIx | | | | | |
| | 488 | 73 | * | | Isoform Long of Iduronate 2-sulfatase | IPI00026104 | LTQ | 1 | 6 | 6 |
| | | | | | precursor | | | | | |
| | 489 | 74 | * | * | Isoform Sap-mu-0 of Proactivator | IPI00012503 | LTQ | 1 | 2 | 3 |
| | | | | | polypeptide precursor | | | | | |
| | 490 | 75 | * | * | ISOFORM XB OF TENASCIN-X | IPI00025276 | LTQ | 0.91 | 2 | 2 |
| | | | | | PRECURSOR | | | | | |
| | 491 | 76 | | | Kappa light chain variable region | IPI00743194 | LTQ | 1 | 2 | 5 |
| | | | | | (Fragment) | | | | | |
| | 492 | 77 | | | keratin, 48K type I microfibrillar, | gi\|71531\|pir\|\| | LTQ | 1 | 7 | 11 |
| | | | | | component 8c-1 - sheep | KRSHL1 | | | | |
| | 493 | 78 | | | KERATIN, GLYCINE/TYROSINE- | gi\|547810\|sp\| | LTQ | 0.96 | 1 | 2 |
| | | | | | RICH OF HAIR | Q02958\|KRHA_SHEEP | | | | |
| | 494 | 79 | | * | Keratin, type I cuticular Ha3-II | IPI00031423 | LTQ | 0.97 | 1 | 1 |
| | 495 | 80 | | | KERATIN, TYPE I | gi\|125090\|sp\| | LTQ | 0.98 | 1 | 1 |
| | | | | | MICROFIBRILLAR 48 KD, | P02534\|K1M1_SHEEP | | | | |
| | | | | | COMPONENT 8C-1 | | | | | |
| | | | | | (LOW-SULFUR KERATIN) | | | | | |
| | 496 | 81 | | | Keratin, type II cytoskeletal 3 | IPI00290857 | LTQ | 0.99 | 3 | 5 |
| | 497 | 82 | | | KERATIN, TYPE II | gi\|547753\|sp\|P | LTQ | 1 | 3 | 3 |
| | | | | | CYTOSKELETAL 4 | | | | | |
| | | | | | (CYTOKERATIN 4) (K4) (CK4) | | | | | |
| | 498 | 83 | | | KERATIN, TYPE II | gi\|125117\|sp\| | LTQ | 1 | 2 | 2 |
| | | | | | MICROFIBRILLAR, | P25691\|K2M3_SHEEP, | | | | |
| | | | | | COMPONENT 5 | gi\| | | | | |
| | | | | | | 346581\|pir\|\|S29094 | | | | |
| | 499 | 84 | | | KERATIN, TYPE II | gi\|125116\|sp\| | LTQ | 1 | 5 | 6 |
| | | | | | MICROFIBRILLAR, | P15241\|K2M2_SHEEP, | | | | |
| | | | | | COMPONENT 7C | gi\| | | | | |
| | | | | | | 89882\|pir\|\|S05408 | | | | |
| | 500 | 85 | * | | Laminin subunit beta-2 precursor | IPI00296922 | LTQ | 0.95 | 1 | 1 |
| | 501 | 86 | * | * | Laminin subunit gamma-1 precursor | IPI00298281 | LTQ | 0.96 | 1 | 1 |
| | 502 | 87 | * | | Latent-transforming growth factor | IPI00292150 | LTQ | 1 | 2 | 2 |
| | | | | | beta-binding protein 2 precursor | | | | | |
| | 503 | 88 | * | | Legumain precursor | IPI00293303 | LTQ | 0.94 | 1 | 1 |
| | 504 | 89 | * | * | L-lactate dehydrogenase B chain | IPI00219217 | LTQ | 0.95 | 1 | 1 |
| | 505 | 90 | * | | Lysosomal protective protein | IPI00021794 | LTQ | 1 | 2 | 2 |
| | | | | | precursor | | | | | |
| | 506 | 91 | * | | Malate dehydrogenase, cytoplasmic | IPI00291005 | LTQ | 0.96 | 1 | 1 |
| | 507 | 92 | | * | Metalloproteinase inhibitor 1 | IPI00032292 | LTQ | 1 | 3 | 4 |
| | | | | | precursor | | | | | |
| | 508 | 93 | | | MYOSIN-REACTIVE | IPI00384407 | LTQ | 1 | 2 | 2 |
| | | | | | IMMUNOGLOBULIN HEAVY | | | | | |
| | | | | | CHAIN VARIABLE REGION | | | | | |
| | | | | | (FRAGMENT) | | | | | |
| | 509 | 94 | | | Myosin-reactive immunoglobulin | IPI00549330 | LTQ | 1 | 3 | 9 |
| | | | | | light chain variable region | | | | | |
| | 510 | 95 | * | | N-acetylglucosamine-6-sulfatase | IPI00012102 | LTQ | 1 | 5 | 5 |
| | | | | | precursor | | | | | |
| | 511 | 96 | * | | Neurocan core protein precursor | IPI00159927 | LTQ | 1 | 2 | 2 |
| | 512 | 97 | * | | Neuronal pentraxin-2 precursor | IPI00026946 | LTQ | 1 | 2 | 3 |
| | 513 | 98 | | | keratin type II, KII-9, hair - sheep | gi\|109048\|pir\|\| | LTQ | 1 | 13 | 18 |
| | | | | | gi\|1308 (X62509) hair | S22025 | | | | |
| | | | | | type II keratin intermediate | | | | | |
| | | | | | filament protein [Ovis aries] | | | | | |
| | 514 | 99 | * | * | Oligodendrocyte-myelin glycoprotein | IPI00295832 | LTQ | 1 | 4 | 8 |
| | | | | | precursor | | | | | |
| | 515 | 100 | * | * | Protein S100-A9 | IPI00027462 | LTQ | 1 | 2 | 2 |
| | 516 | 101 | * | | retbindin | IPI00027765 | LTQ | 1 | 2 | 2 |
| | 517 | 102 | * | * | Retinoic acid receptor responder | IPI00019176 | LTQ | 1 | 4 | 5 |
| | | | | | protein 2 precursor | | | | | |
| | 518 | 103 | * | | Secreted frizzled-related | IPI00027596 | LTQ | 0.96 | 1 | 1 |
| | | | | | protein 2 precursor | | | | | |
| | 519 | 104 | * | | Secreted frizzled-related | IPI00294650 | LTQ | 1 | 9 | 20 |
| | | | | | protein 3 precursor | | | | | |
| | 520 | 105 | | | Serine/threonine-protein phosphatase | IPI00298731 | LTQ | 0.95 | 1 | 2 |
| | | | | | 1 regulatory subunit 10 | | | | | |
| | 521 | 106 | * | | similar to 60S ribosomal protein L23a | IPI00001310 | LTQ | 1 | 2 | 14 |
| | 522 | 107 | | | SIMILAR TO IG KAPPA CHAIN | IPI00784430 | LTQ | 1 | 5 | 10 |
| | | | | | V-IV REGION JI PRECURSOR | | | | | |
| | 523 | 108 | | | similar to serine (or cysteine) | IPI00376007 | LTQ | 0.93 | 1 | 2 |
| | | | | | proteinase inhibitor, clade E | | | | | |
| | | | | | (nexin, plasminogen activator | | | | | |
| | | | | | inhibitor type 1), member 2 | | | | | |
| | 524 | 109 | | | STATHERIN PRECURSOR | IPI00022990 | LTQ | 0.96 | 1 | 1 |
| | 525 | 110 | * | * | TBC1 domain family member 1 | IPI00164610 | LTQ | 0.99 | 2 | 3 |
| | 526 | 111 | * | | Testican-1 precursor | IPI00005292 | LTQ | 1 | 4 | 7 |
| | 527 | 112 | | * | THROMBOSPONDIN-1 | IPI00296099 | LTQ | 0.95 | 2 | 2 |
| | | | | | PRECURSOR | | | | | |
| | 528 | 113 | * | * | transmembrane protein 132A | IPI00301865 | LTQ | 1 | 4 | 5 |
| | 529 | 114 | | | isoform b TRYPSINOGEN | gi\|136425\|sp\| | LTQ | 0.98 | 2 | 6 |
| | | | | | | P00760\|TRYP_BOVIN | | | | |
| | 530 | 115 | * | | Two-pore calcium channel protein 2 | IPI00169371 | LTQ | 0.92 | 1 | 1 |
| | 531 | 116 | * | | V2-7 PROTEIN | IPI00747752 | LTQ | 1 | 6 | 65 |

[0115] It has been suggested that the proteome profile of vitreous humor is similar to that of serum [24]. However, some proteins have been reported to be present in vitreous samples, e.g., pigment epithelium-derived factor (PEDF), prostaglandin-D2 synthase, plasma glutathione peroxidase, and interphotoreceptor retinoid-binding protein (IRBP) [24], which were also detected in the present study.

[0116] Moreover, 240 vitreous proteins, which have not been reported previously in vitreous, were identified during the present study, these include, hepatocyte growth factor activator, kallistatin precursor, thioredoxin, von Willebrand factor (vWF), Wnt inhibitory factor, chromogranin and secreted frizzled-related protein (see Table 8 to 16). Moreover, some of these identified proteins have also been detected in the human plasma proteome (see Table 8 to 16). The 531 vitreous proteins identified in the present study were compared to the plasma proteome generated by the HUPO PPP consortium (Human Proteome Organization, Plasma Proteome Project), which listed 9,504 plasma proteins. Of the 531 proteins in our vitreous proteome, 304 had not been found in plasma, and of the 240 newly detected vitreous proteins 132 had not been found in plasma.

[0117] In particular, the locations A, B, C and G in the Venn diagram (FIG. 7C) represent proteins that were detected only in PDR or the control. 185 proteins were only detected in PDR (A, B, and C in FIG. 7C) whereas 116 proteins were detected only in the control (G in FIG. 7C).

[0118] (5) Characterization of Vitreous Proteins Via Gene Ontology Annotation

[0119] Identified proteins of Table 8 to 16 were annotated using the upper level of gene ontology (GO slim, level 3). Based on Gene Ontology (GO) annotations, we were able to assign “biological process”, “molecular function” and “cellular component” to each identified protein in the depleted PDR, non-depleted PDR, and control MH samples. For the categories “molecular function” and “cellular component” identified proteins most frequently picked up subcategories of “binding” and “extracellular region”, respectively (data not shown).

[0120] Interestingly, no significant differences were observed between PDR and the control vitreous proteins in terms of patterns of GO annotation, other than the number of proteins assigned to “immune system process” and “response to stimulus” subcategories in the category of “biological process”, which were higher in non-depleted PDR than in control or depleted PDR (FIG. 8). This may indicate that non-depleted PDR contained much more immunoglobulin and complement component species than the other two sample sets because the “immune system process” and “response to stimulus” subcategories comprise more protein products related to the two subcategories. Alternatively, the increase of these two subcategories might be also considered to be the result of increased vascular permeability or breakdown of the blood-retinal barrier in PDR. On the other hand, this increase can also be deducted from the fact that albumin and IgG were substantively removed from the depleted PDR samples.

[0121] Consequently, the GO annotation study indicated that there exist diverse kinds of proteins in vitreous, and that they may reflect the physiologic and pathologic changes in retinal disease and vitreoretinal interactions during pathologic conditions. Even though the protein concentrations in PDR and MH vitreous samples differed by 10 fold, protein profiles in the two samples were similar, as inferred from the GO annotation profile category “biological process” (FIG. 8). It is conceivable that the concentrations of most existing vitreous proteins increase with PDR progression, rather than new diverse pathogenic proteins being generated to the extent that they increase protein levels to 10 times that of non-diabetic vitreous proteins.

### 3. Conclusion

[0122] In this study, 531 proteins were identified in the vitreous proteome, and 415 and 346 proteins were identified in PDR and control MH vitreous samples, respectively. Of the 531 proteins identified, 240 proteins were identified for the first time during this study. Moreover, 304 of the 531 proteins, including 132 proteins among the newly detected 240 vitreous proteins, were not listed in the HUPO plasma proteome. This list is also the most comprehensive proteome for PDR and normal vitreous samples, and provides fundamental information for those researching vitreoretinal disorders, such as, diabetic retinopathy.

### Example 2

### 1. Materials and Methods

[0123] (1) Reagents

[0124] β-galactosidase peptides is obtained from Applied Biosystems (USA) and acetonitrile (ACN), formic acid (FA), trifluoro acetic acid (TFA) and most other chemicals such as urea, DTT and IAA are from Sigama (USA). C18 Ziptip for peptide desalting is from Millipore (USA) and trypsin for in-solution digestion of protein is from Promega (Madison, Wis., USA). Vitreous and its corresponding plasma had been collected at Seoul National University Hospital after IRB approval.

[0125] (2) Sample Collection

[0126] Vitreous samples were collected as described previously. Plasma samples which are corresponding to individual vitreous sample were collected in K₂-EDTA Vacutainer (BD Sciences, USA). After incubating 30 min in room temperature, the centrifugation in 3,000 g during 10 min was followed. Each plasma sample was divided as 50 μl and was kept in −70□.

[0127] (3) Concentration Determination

[0128] Beforehand, each plasma sample was diluted with 3 volumes of distilled water to be 1/50 diluted in order to reduce pipetting error. BCA assay was carried out using 96 well microplate to determine the concentration of both vitreous and its corresponding plasma. Standard curve was plotted using 5-points of the bovine serum albumin concentration (range: 0.2 μg/μl˜1.0 μg/μl including bank, R²=0.99). After reading the absorbance at 450 nm, each protein concentration was calculated using linear regression method.

[0129] (4) Western Blotting

[0130] Primary antibody of thyroxine-binding globulin precursor for plasma sample was purchased from Abcam (USA). SDS-PAGE was conducted using 10% gel. Each plasma samples, which are corresponding to the vitreous sample, were applied. Equal amounts of proteins were separated by SDS-PAGE and transferred to PVDF membranes, which were then blocked with 5% BSA (w/v) in TBST 0.1% for 2 hr at room temperature. Membranes were then incubated overnight at 4□ with primary antibodies at a dilution of 1:1000. Blots were visualized using peroxidase-conjugated secondary antibodies and ECL system (Amersham-Pharmacia Biotech, Piscataway, N.J., USA). Band densities were quantified by Phoretix program (Non-linear Dynamics, USA).

[0131] (5) Sample Preparation for Mass Spectrometry The same volume of each vitreous (60 μl) was used and 200 μg of each plasma was applied to this analysis. After reducing the volume of each sample using lyophilization, proteins were denatured using 6 M Urea and 10 mM DTT was added to reduce disulfide bonding, followed by alkylation using 55 mM iodoacetamide (IAA). After adding distilled water to dilute the urea concentration, trypsin digestion was carried out (protein: trypsin=50:1). After incubation at 37□ during overnight, 0.1% TFA was added to stop the trypsin digestion. The trypsin-digested peptide mixtures were applied to C18 ZipPlate for desalting, followed by lyophilization. Finally, 10 μl Sol A (98% DW, 2% ACN, 0.1% FA and 0.05% TFA) was added to dissolve peptides for MRM analysis.

[0132] (6) Multiple Reaction Monitoring (MRM)

[0133] After grouping identified proteins as PDR specific (Groups A, B and C in FIG. 7C), both unique peptides and observed peptides of interesting proteins are accounted. Total number of peptides for each protein that were identified in previous research are counted and plotted in FIG. 9. As another approach, target proteins are selected which show high abundance in any literature. We used 3 different approaches to determine target transitions. The first method is to use LC-MS/MS spectrum from the previous study. The second is to use MIDAS workflow. Thirdly, it is to use the PeptideAtlas database.

[0134] Next, the peptide mixtures from vitreous or plasma were applied to mass spectrometry and analyzed with EMS mode followed by four EPI modes. After identification of proteins using ProteinPilot program, the experimental transition are selected from fragment ions in MS/MS spectrum. The MIDAS program can generate the transition candidates from the amino acid sequence. Among these transition candidates, the effective transitions are again confirmed after examining MS/MS spectrum. The PeptideAtlas DB could provide the information of MS/MS spectrum for the interested proteins. Using these MS/MS information, the transitions can be finally determined for the next MRM assay.

[0135] With the chosen transitions, MRM assay was performed using 4000 Q-TRAP and nano Tempo MDLC (AppiledBiosystems, USA). Peptide mixtures was separated using C18 column (100 Å, 100 μm ID, 150 mm, Michrome, USA) using Sol A (98% DW, 2% ACN, 0.1% FA and 0.05% TFA) and Sol B (98% ACN, 2% DW, 0.1% FA and 0.05% TFA) with gradient. Flow rate is 400 nl/min as constant at room temperature and exponential gradient elution was performed by increasing the mobile phase composition from 0 to 50% of Sol B over 30 min. The gradient was then ramped to 90% B for 10 min and back to 0% solution B for 20 min to equilibrate the column for the next run. The total LC running time is 60 min. Additionally, to reduce the void volume and obtain sharp transition peak, direct sample injection was carried out from auto sampler to main C18 column using 1 μl sample loop. Ionization was carried out using standard type Nanospary emitter. Spray voltage is 2600 V and declustering potential (DP) was set at 70 V and the time for all transitions was kept at 30 ms. A 4000 Q-TRAP hybrid triple quadrupole linear ion trap mass spectrometer (Applied Biosystems, Foster City, Calif., USA) was interfaced with a nanospray source. Source temperature was set at 160° C., and source voltage was set at 2,600 V. Collision energy (CE) for each transition was based on the results from the preliminary runs and generally was similar to theoretical values calculated from the equations CE=0.044*(m/z)+8 for (M⁺2H⁺) ions and CE=0.030*(m/z)+8 for (M⁺3H⁺) ions.

[0136] (7) Data Manipulation and Statistical Analysis

[0137] All MRM data were processed using MultiQuant ver. 1.0 (AppliedBiosystems, USA) program for extracting transitions and other calculation. From export of result table, peak area values are extracted and normalized with internal standard transition (530.8/582 from β-galactosidase peptide, of which concentration is 50 fmol). Each normalized peak area of a transition was analyzed to investigate the statistical meaning. The Medicalc, SPSS, and SigmaPlot programs were used for statistical analysis such as pair-wise t-test, ROC curve plotting and interactive plots.

### 2. Results

[0138] (1) Characteristics of Vitreous and Corresponding Plasma

[0139] The sample number of MH group was 15 (male: 4, female: 11) and that of NPDR group is 18 (male: 8, NPDR: 10). 18 PDR samples (male: 9, female: 9) was also used to analyze the vitreous/plasma proteome. The age distribution of each group is shown in FIG. 10. The concentration of each vitreous sample group is different from each other. Average concentration of PDR and NPDR is higher than that of MH (Table 17). The concentration of plasma shows the even distribution, which indicates that the variation in vitreous concentration is not related with plasma concentration.

TABLE 17

| | | | Average Protein |
|---|---|---|---|
| Sample set | | Sample | Concentration (μg/μl) |
| (patient numbers) | | Number | (range) |
| Vitreous | MH | 15 | 1.97 (0.40-4.20) |
| | NPDR | 18 | 4.03 (1.11-7.72) |
| | PDR | 18 | 4.54 (2.18-7.52) |
| Plasma | MH | 15 | 65.15 (51.95-82.19) |
| | NPDR | 18 | 81.44 (56.84-106.13) |
| | PDR | 18 | 75.28 (91.06-59.06) |

[0140] (2) Transition Selection

[0141] The transition representing respective proteins in this study were selected using 3 different ways. The first is MIDAS workflow and the second is utilization of previous data (FIG. 9). MIDAS workflow could provide the theoretical transitions using the protein sequence of which pattern was confirmed by MS/MS experiment. Among several candidate transitions, the best transition, which shows the highest signal, was selected. The second was to use the MS/MS data from other experiments. If the target proteins were identified by other MS experiment, the transition can be selected using its MS/MS spectrum. The third way is the application of peptide database such as Peptide Atlas and GPMDB, which had been identified by other researchers in proteomic fields. These DB provide the informative MS/MS spectrum of peptides that are what we are investigating for.

[0142] (3) Standard Curve Determination

[0143] The standard curve was determined using β-galactosidase peptide, of which concentration is already known. The range of concentrations was from 100 fmoles to 500 amoles. The correlation factor for linearity is 0.9951, which means that the standard curve of β-galactosidase is reasonable. Using the β-galactosidase standard curve, the relative quantitation for target proteins was extrapolated. To validate the standard curve, the concentration of apolipoprotein A1 was determined using the standard curve of β-galactosidase. The serially diluted plasma was used. The good correlation between the dilution factor and each extrapolated concentrations of apolipoprotein A1 was shown. When the dilution factors increase, the calculated concentrations show the correlation (data not shown).

[0144] (4) DR Specific Biomarker In Vitreous

[0145] The results of MRM assay for the MH (considered as non-diabetic control), NPDR and PDR vitreous were analyzed with several statistical methods including t-TEST and ROC curve plotting. First, the peak area for each extracted transitions in MRM assay were normalized versus internal standard peak area of β-galactosidase (transitions of 542.3/636.3) which is at 100 fmole concentration. The normalized peak areas of transitions are compared in MH versus PDR and MH versus NPDR. The interactive plots and ROC (receiver operating characteristic) curve, which show the concentration difference for each group, is drawn (MH (non-diabetic control) and PDR, MH (non-diabetic control) and NPDR). Plot for each candidate protein was drawn according to the protein name and transitions.

[0146] The plots shown in FIG. 11 are the interactive plot and ROC curve of TBG, which is for MH (non-diabetic control) versus PDR in vitreous set. Each interactive plot shows the relatively normalized concentration to 3-galactosidase, sensitivity and specificity. The plots shown in FIG. 12 are the interactive plots and the ROC curves for MH (non-diabetic control) versus NPDR vitreous set. From these two kinds of plots, we could confirm that TBG is clearly differently expressed between two groups. As a result, thyroxine-binding globulin precursor (TBG) shows increase in both PDR and NPDR compared with MH (non-diabetic control) in vitreous sample set.

[0147] (6) Diabetic Retinopathy (DR) Specific Biomarker in Plasma

[0148] In plasma set, the pattern of thyroxine-binding globulin precursor expression is identical from those for corresponding vitreous samples, where their AUC values were more than 90%. FIG. 13 shows interactive plots of MH versus PDR in plasma sample set. FIG. 14 shows interactive plots and ROC curve of MH versus NPDR in plasma sample set. The vitreous sample set showed excellent AUC value and in plasma sample set, which is the similar case to the PDR versus MH comparison. And thyroxine-binding globulin precursor could be good enough to differentiate NPDR from non-diabetic control plasma, where their AUC values were more than 90%. In summary, based on the interactive plots and ROC curve for both MH versus NPDR and MH versus NPDR in plasma sample set, TBG is biomarkers to differentiate DR plasma from non-diabetic control plasma.

[0149] (7) TBG is a Diabetes Mellitus (DM) Biomarker in Both Vitreous and Plasma

[0150] As shown in FIGS. 15 and 16, the levels of thyroxine-binding globulin precursor (TBG) in both vitreous and plasma of PDR and NPDR states are outstandingly higher than in non-diabetic control (MH). It indicates that TBG is a good biomarker which can distinguish both PDR and NPDR from non-diabetic condition. The AUC value of TBG in vitreous and plasma (MH versus PDR and MH versus NPDR) is nearly 1.0 as in below, which indicates its excellent specificity and sensitivity as biomarker.

[0151] In order to confirm that TBG is an excellent biomarker, the additional Western-blot assay was performed to validate the effectiveness of TBG. The sample size for the Western blot was 16 healthy normal plasmas, 16 DM plasmas and 16 NPDR plasmas. Each western blot was developed to measure band intensity with densitometry and normalized with total volume of intensity. The averaged intensity of each group was calculated and statistically analyzed.

[0152] According to the above Western blot experiment, the significant difference of TBG concentration is observed among disease states (FIG. 17). The healthy control group shows the low level of TBG concentrations in plasma. By contrast, DM and NPDR groups indicated that the levels of TBG are highly increased much more than in that of normal control group. Therefore, it can be concluded that TBG increase in both diabetes and diabetic retinopathy than in healthy normal status. This Western result is corresponding to MRM outcome, which may represent that MRM can determine protein expression properly as efficient as other means. In summary, based on the Western blot data among normal control, DM and NPDR plasma samples, TBG can be a biomarker to distinguish normal control plasma from DM patients including DR plasma.

[0153] (8) NPDR Specific Biomarkers in Plasma

[0154] Once NPDR occurs, it inevitably develops to PDR. Thus, the value of NPDR biomarkers for DR (including NPDR and PDR) diagnosis should be very high. The discovery of NPDR biomarkers in plasma using MRM assay was performed using the 16 normal control and 16 DM control (DM without DR), and 18 NPDR samples in Table 18.

TABLE 18

| Group | Sex | Sample Number | Age (Median) |
|---|---|---|---|
| Normal control | Male | 8 | 55-69 (60.8) |
| | Female | 8 | 48-77 (60.3) |
| DM control | Male | 8 | 53-70 (60.6) |
| | Female | 8 | 43-70 (58.8) |
| NPDR | Male | 8 | 58-70 (66.0) |
| | Female | 10 | 54-77 (66.5) |

[0155] As shown in FIGS. 18 and 19, kallistatin precursor increases in NPDR and decreases in normal states and in DM, which means it can distinguish the NPDR states from the normal and from diabetic states. Therefore, kallistatin precursor can be used for a NPDR specific biomarker.

The application's sequence listing, which the Patent Office published only in electronic form, follows.

SEQUENCE LISTING (170 sequences)

SEQ ID NO: 1 - protein, 914 aa, Homo sapiens
MKPPRPVRTCSKVLVLLSLLAIHQTTTAEKNGIDIYSLTVDSRVSSRFAHTVVTSRVVNRANTVQEATFQMELPKKAFITNFSMIIDGMTYPGIIKEKAEAQAQYSAAVAKGKSAGLVKATGRNMEQFQVSVSVAPNAKITFELVYEELLKRRLGVYELLLKVRPQQLVKHLQMDIHIFEPQGISFLETESTFMTNQLVDALTTWQNKTKAHIRFKPTLSQQQKSPEQQETVLDGNLIIRYDVDRAISGGSIQIENGYFVHYFAPEGLTTMPKNVVFVIDKSGSMSGRKIQQTREALIKILDDLSPRDQFNLIVFSTEATQWRPSLVPASAENVNKARSFAAGIQALGGTNINDAMLMAVQLLDSSNQEERLPEGSVSLIILLTDGDPTVGETNPRSIQNNVREAVSGRYSLFCLGFGFDVSYAFLEKLALDNGGLARRIHEDSDSALQLQDFYQEVANPLLTAVTFEYPSNAVEEVTQNNFRLLFKGSEMVVAGKLQDRGPDVLTATVSGKLPTQNITFQTESSVAEQEAEFQSPKYIFHNFMERLWAYLTIQQLLEQTVSASDADQQALRNQALNLSLAYSFVTPLTSMVVTKPDDQEQSQVAEKPMEGESRNRNVHSAGAAGSRMNFRPGVLSSRQLGLPGPPDVPDHAAYHPFRRLAILPASAPPATSNPDPAVSRVMNMKIEETTMTTQTPACPSCSRSRAPAVPAPIQAPSAILPLPGQSVERLCVDPRHRQGPVNLLSDPEQGVEVTGQYEREKAGFSWIEVTFKNPLVWVHASPEHVVVTRNRRSSAYKWKETLFSVMPGLKMTMDKTGLLLLSDPDKVTIGLLFWDGRGEGLRLLLRDTDRFSSHVGGTLGQFYQEVLWGSPAASDDGRRTLRVQGNDHSATRERRLDYQEGPPGVEISCWSVEL

SEQ ID NO: 2 - protein, 57 aa, Homo sapiens
KPGKVPKHLIYAASSLQSGVPSRFSGSGSGTEFTLTISSLQPEDFATYYCLQHNSYP

SEQ ID NO: 3 - protein, 255 aa, Homo sapiens
MDDREDLVYQAKLAEQAERYDEMVESMKKVAGMDVELTVEERNLLSVAYKNVIGARRASWRIISSIEQKEENKGGEDKLKMIREYRQMVETELKLICCDILDVLDKHLIPAANTGESKVFYYKMKGDYHRYLAEFATGNDRKEAAENSLVAYKAASDIAMTELPPTHPIRLGLALNFSVFYYEILNSPDRACRLAKAAFDDAIAELDTLSEESYKDSTLIMQLLRDNLTLWTSDMQGDGEEQNKEALQDVEDENQ

SEQ ID NO: 4 - protein, 156 aa, Homo sapiens
MATKAVCVLKGDGPVQGIINFEQKARAGTEALKVWGSIKGLTEGLHGFHVHEFGDNTAGCTSAGPHFNPLSRKHGGPKDEERHVGDLGNVTADKDGVADVSIEDSVISLSGDHCIIGRTLVVHEKADDLGKGGNEESTKTGNAGSRLACGVIGIAQ

SEQ ID NO: 5 - protein, 1839 aa, Homo sapiens
MDVHTRWKARSALRPGAPLLPPLLLLLLWAPPPSRAAQPADLLKVLDFHNLPDGITKTTGFCATRRSSKGPDVAYRVTKDAQLSAPTKQLYPASAFPEDFSILTTVKAKKGSQAFLVSIYNEQGIQQIGLELGRSPVFLYEDHTGKPGPEDYPLFRGINLSDGKWHRIALSVHKKNVTLILDCKKKTTKFLDRSDHPMIDINGIIVFGTRILDEEVFEGDIQQLLFVSDHRAAYDYCEHYSPDCDTAVPDTPQSQDPNPDEYYTEGDGEGETYYYEYPYYEDPEDLGKEPTPSKKPVEAAKETTEVPEELTPTPTEAAPMPETSEGAGKEEDVGIGDYDYVPSEDYYTPSPYDDLTYGEGEENPDQPTDPGAGAEIPTSTADTSNSSNPAPPPGEGADDLEGEFTEETIRNLDENYYDPYYDPTSSPSEIGPGMPANQDTIYEGIGGPRGEKGQKGEPAIIEPGMLIEGPPGPEGPAGLPGPPGTMGPTGQVGDPGERGPPGRPGLPGADGLPGPPGTMLMLPFRFGGGGDAGSKGPMVSAQESQAQAILQQARLALRGPAGPMGLTGRPGPVGPPGSGGLKGEPGDVGPQGPRGVQGPPGPAGKPGRRGRAGSDGARGMPGQTGPKGDRGFDGLAGLPGEKGHRGDPGPSGPPGPPGDDGERGDDGEVGPRGLPGEPGPRGLLGPKGPPGPPGPPGVTGMDGQPGPKGNVGPQGEPGPPGQQGNPGAQGLPGPQGAIGPPGEKGPLGKPGLPGMPGADGPPGHPGKEGPPGEKGGQGPPGPQGPIGYPGPRGVKRGGPGAESGKGPPGRRGEDGFPGFKGDMGIKGDRGEIGPPGPRGEDGPEGPKGRGGPNGDPGPLGPPGEKGKLGVPGLPGYPGRQGPKGSIGFPGFPGANGEKGGRGTPGKPGPRGQRGPTGPRGERGPRGITGKPGPKGNSGGDGPAGPPGERGPNGPQGPTGFPGPKGPPGPPGKDGLPGHPGQRGETGFQGKTGPPGPPGVVGPQGPTGETGPMGERGHPGPPGPPGEQGLPGLAGKEGTKGDPGPAGLPGKDGPPGLRGFPGDRGLPGPVGALGLKGNEGPPGPPGPAGSPGERGPAGAAGPIGIPGRPGPQGPPGPAGEKGAPGEKGPQGPAGRDGLQGPVGLPGPAGPVGPPGEDGDKGEIGEPGQKGSKGDKGEQGPPGPTGPQGPIGQPGPSGADGEPGPRGQQGLFGQKGDEGPRGFPGPPGPVGLQGLPGPPGEKGETGDVGQMGPPGPPGPRGPSGAPGADGPQGPPGGIGNPGAVGEKGEPGEAGEPGLPGEGGPPGPKGERGEKGESGPSGAAGPPGPKGPPGDDGPKGSPGPVGFPGDPGPPGEPGPAGQDGPPGDKGDDGEPGQTGSPGPTGEPGPSGPPGKRGPPGPAGPEGRQGEKGAKGEAGLEGPPGKTGPIGPQGAPGKPGPDGLRGIPGPVGEQGLPGSPGPDGPPGPMGPPGLPGLKGDSGPKGEKGHPGLIGLIGPPGEQGEKGDRGLPGPQGSSGPKGEQGITGPSGPIGPPGPPGLPGPPGPKGAKGSSGPTGPKGEAGHPGPPGPPGPPGEVIQPLPIQASRTRRNIDASQLLDDGNGENYVDYADGMEEIFGSLNSLKLEIEQMKRPLGTQQNPARTCKDLQLCHPDFPDGEYWVDPNQGCSRDSFKVYCNFTAGGSTCVFPDKKSEGARITSWPKENPGSWFSEFKRGKLLSYVDAEGNPVGVVQMTFLRLLSASAHQNVTYHCYQSVAWQDAATGSYDKALRFLGSNDEEMSYDNNPYIRALVDGCATKKGYQKTVLEIDTPKVEQVPIVDIMFNDFGEASQKFGFEVGPACFMG

SEQ ID NO: 6 - protein, 554 aa, Homo sapiens
MSVRYSSSKHYSSSRSGGGGGGGGLSSLRISSSKGSLGGGFSSGGFSGGSFSRGSSGGGCFGGSSGGYGGLGGFGGGSFRGSYGSSSFGGSYGGIFGGGSFGGGSFGGGSFGGGGFGGGGFGGGFGGGFGGDGGLLSGNEKVTMQNLNDRLASYLDKVRALEESNYELEGKIKEWYEKHGNSHQGEPRDYSKYYKTIDDLKNQILNLTTDNANILLQIDNARLAADDFRLKYENEVALRQSVEADINGLRRVLDELTLTKADLEMQIESLTEELAYLKKNHEEEMKDLRNVSTGDVNVEMNAAPGVDLTQLLNNMRSQYEQLAEQNRKDAEAWFNEKSKELTTEIDNNIEQISSYKSEITELRRNVQALEIELQSQLALKQSLEASLAETEGRYCVQLSQIQAQISALEEQLQQIRAETECQNTEYQQLLDIKIRLENEIQTYRSLLEGEGSSGGGHGGGHGGSSGGGYGGGSSGGGSSGGGYGGGSSSGGHGGSSSGGYGGGSSGGGGGGYGGGSSGGGSSSGGGYGGGSSSGGHKSSSSGSVGESSSKGPRS

SEQ ID NO: 7 - protein, 846 aa, Homo sapiens
MFSVVDENFSWYLEDNIKTYCSEPEKVDKDNEDFQESNRMYSVNGYTFGSLPGLSMCAEDRVKWYLFGMGNEVDVHAAFFHGQALTNKNYRIDTINLFPATLFDAYMVAQNPGEWMLSCQNLNHLKAGLQAFFQVQECNKSSSKDNIRGKHVRHYYIAAEEIIWNYAPSGIDIFTKENLTAPGSDSAVFFEQGTTRIGGSYKKLVYREYTDASFTNRKERGPEEEHLGILGPVIWAEVGDTIRVTFHNKGAYPLSIEPIGVRFNKNNEGTYYSPNYNPQSRSVPPSASHVAPTETFTYEWTVPKEVGPTNADPVCLAKMYYSAVEPTKDIFTGLIGPMKICKKGSLHANGRQKDVDKEFYLFPTVFDENESLLLEDNIRMFTTAPDQVDKEDEDFQESNKMHSMNGFMYGNQPGLTMCKGDSVVWYLFSAGNEADVHGIYFSGNTYLWRGERRDTANLFPQTSLTLHMWPDTEGTFNVECLTTDHYTGGMKQKYTVNQCRRQSEDSTFYLGERTYYIAAVEVEWDYSPQREWEKELHHLQEQNVSNAFLDKGEFYIGSKYKKVVYRQYTDSTFRVPVERKAEEEHLGILGPQLHADVGDKVKIIFKNMATRPYSIHAHGVQTESSTVTPTLPGETLTYVWKIPERSGAGTEDSACIPWAYYSTVDQVKDLYSGLIGPLIVCRRPYLKVFNPRRKLEFALLFLVFDENESWYLDDNIKTYSDHPEKVNKDDEEFIESNKMHAINGRMFGNLQGLTMHVGDEVNWYLMGMGNEIDLHTVHFHGHSFQYKHRGVYSSDVFDIFPGTYQTLEMFPRTPGIWLLHCHVTDHIHAGMETTYTVLQNEDTKSG

SEQ ID NO: 8 - protein, 244 aa, Homo sapiens
MLLLGAVLLLLALPGHDQETTTQGPGVLLPLPKGACTGWMAGIPGHPGHNGAPGRDGRDGTPGEKGEKGDPGLIGPKGDIGETGVPGAEGPRGFPGIQGRKGEPGEGAYVYRSAFSVGLETYVTIPNMPIRFTKIFYNQQNHYDGSTGKFHCNIPGLYYFAYHITVYMKDVKVSLFKKDKAMLFTYDQYQENNVDQASGSVLLHLEVGDQVWLQVYGEGERNGLYADNDNDSTFTGFLLYHDTN

SEQ ID NO: 9 - protein, 180 aa, Homo sapiens
GNIFANLFKGLFGKKEMRILMVGLDAAGKTTILYKLKLGEIVTTIPTIGFNVETVEYKNISFTVWDVGGQDKIRPLWRHYFQNTQGLIFVVDSNDRERVNEAREELMRMLAEDELRDAVLLVFANKQDLPNAMNAAEITDKLGLHSLRHRNWYIQATCATSGDGLYEGLDWLSNQLRNQK

SEQ ID NO: 10 - protein, 3388 aa, Homo sapiens
MAAAARPRGRALGPVLPPTPLLLLVLRVLPACGATARDPGAAAGLSLHPTYFNLAEAARIWATATCGERGPGEGRPQPELYCKLVGGPTAPGSGHTIQGQFCDYCNSEDPRKAHPVTNAIDGSERWWQSPPLSSGTQYNRVNLTLDLGQLFHVAYILIKFANSPRPDLWVLERSVDFGSTYSPWQYFAHSKVDCLKEFGREANMAVTRDDDVLCVTEYSRIVPLENGEVVVSLINGRPGAKNFTFSHTLREFTKATNIRLRFLRTNTLLGHLISKAQRDPTVTRRYYYSIKDISIGGQCVCNGHAEVCNINNPEKLFRCECQHHTCGETCDRCCTGYNQRRWRPAAWEQSHECEACNCHGHASNCYYDPDVERQQASLNTQGIYAGGGVCINCQHNTAGVNCEQCAKGYYRPYGVPVDAPDGCIPCSCDPEHADGCEQGSGRCHCKPNFHGDNCEKCAIGYYNFPFCLRIPIFPVSTPSSEDPVAGDIKGNFLSSAGCDCNLEGVLPEICDAHGRCLCRPGVEGPRCDTCRSGFYSFPICQACWCSALGSYQMPCSSVTGQCECRPGVTGQRCDRCLSGAYDFPHCQGSSSACDPAGTINSNLGYCQCKLHVEGPTCSRCKLLYWNLDKENPSGCSECKCHKAGTVSGTGECRQGDGDCHCKSHVGGDSCDTCEDGYFALEKSNYFGCQGCQCDIGGALSSMCSGPSGVCQCREHVVGKVCQRPENNYYFPDLHHMKYEIEDGSTPNGRDLRFGFDPLAFPEFSWRGYAQMTSVQNDVRITLNVGKSSGSLFRVILRYVNPGTEAVSGHITIYPSWGAAQSKEIIFLPSKEPAFVTVPGNGFADPFSITPGIWVACIKAEGVLLDYLVLLPRDYYEASVLQLPVTEPCAYAGPPQENCLLYQHLPVTRFPCTLACEARHFLLDGEPRPVAVRQPTPAHPVMVDLSGREVELHLRLRIPQVGHYVVVVEYSTEAAQLFVVDVNVKSSGSVLAGQVNIYSCNYSVLCRSAVIDHMSRIAMYELLADADIQLKGHMARFLLHQVCIIPIEEFSAEYVRPQVHCIASYGRFVNQSATCVSLAHETPPTALILDVLSGRPFPHLPQQSSPSVDVLPGVTLKAPQNQVTLRGRVPHLGRYVFVIHFYQAAHPTFPAQVSVDGGWPRAGSFHASFCPHVLGCRDQVIAEGQIEFDISEPEVAATVKVPEGKSLVLVRVLVVPAENYDYQILHKKSMDKSLEFITNCGKNSFYLDPQTASRFCKNSARSLVAFYHKGALPCECHPTGATGPHCSPEGGQCPCQPNVIGRQCTRCATGHYGFPRCKRKCTCGRRLCEEMTGQCRCPPRTVRPQCEVCETHSFSFHPMAGCEGCNCSRRGTIEAAMPECDRDSGQCRCKPRITGRQCDRCASGFYRFPECVPCNCNRDGTEPGVCDPGTGACLCKENVEGTECNVCREGSFHLDPANLKGCTSCFCFGVNNQCHSSHKRRTKFVDMLGWHLETADRVDIPVSFNPGSNSMVADLQELPATIHSASWVAPTSYLGDKVSSYGGYLTYQAKSFGLPGDMVLLEKKPDVQLTGQHMSIIYEETNTPRPDRLHHGRVHVVEGNFRHASSRAPVSREELMTVLSRLADVRIQGLYFTETQRLTLSEVGLEEASDTGSGRIALAVEICACPPAYAGDSSCSMGWLWIFGAALGQCLGYSSQQQRVPFLQPPGQSQLQASYVEFRPSQGCSPGYYRDHKGLYTGRCVPCNCNGHSNQCQDGSGICVNCQHNTAGEHCERCQEGYYGNAVHGSCRACPCPHTNSFATGCVVNGGDVRCSCKAGYTGTQCERCAPGYFGNPQKFGGSCQPCSCNSNGQLGSCHPLTGDCINQEPKDSSPAEECDDCDSCVMTLLNDLATMGEQLRLVKSQLQGLSASAGLLEQMRHMETQAKDLRNQLLNYRSAISNHGSKIEGLERELTDLNQEFETLQEKAQVNSRKAQTLNNNVNRATQSAKELDVKIKNVIRNVHILLKQISGTDGEGNNVPSGDFSREWAEAQRMMRELRNRNFGKHLREAEADKRESQLLLNRIRTWQKTHQGENNGLANSIRDSLNEYEAKLSDLRARLQEAAAQAKQANGLNQENERALGAIQRQVKEINSLQSDFTKYLTTADSSLLQTNIALQLMEKSQKEYEKLAASLNEARQELSDKVRELSRSAGKTSLVEEAEKHARSLQELAKQLEEIKRNASGDELVRCAVDAATAYENILNAIKAAEDAANRAASASESALQTVIKEDLPRKAKTLSSNSDKLLNEAKMTQKKLKQEVSPALNNLQQTLNIVTVQKEVIDTNLTTLRDGLHGIQRGDIDAMISSAKSMVRKANDITDEVLDGLNPIQTDVERIKDTYGRTQNEDFKKALTDADNSVNKLTNKLPDLWRKIESINQQLLPLGNISDNMDRIRELIQQARDAASKVAVPMRFNGKSGVEVRLPNDLEDLKGYTSLSLFLQRPNSRENGGTENMFVMYLGNKDASRDYIGMAVVDGQLTCVYNLGDREAELQVDQILTKSETKEAVMDRVKFQRIYQFARLNYTKGATSSKPETPGVYDMDGRNSNTLLNLDPENVVFYVGGYPPDFKLPSRLSFPPYKGCIELDDLNENVLSLYNFKKTFNLNTTEVEPCRRRKEESDKNYFEGTGYARVPTQPHAPIPTFGQTIQTTVDRGLLFFAENGDRFISLNIEDGKLMVRYKLNSELPKERGVGDAINNGRDHSIQIKIGKLQKRMWINVDVQNTIIDGEVFDFSTYYLGGIPIAIRERFNISTPAFRGCMKNLKKTSGVVRLNDTVGVTKKCSEDWKLVRSASFSRGGQLSFTDLGLPPTDHLQASFGFQTFQPSGILLDHQTWTRNLQVTLEDGYIELSTSDSGSPIFKSPQTYMDGLLHYVSVISDNSGLRLLIDDQLLRNSKRLKHISSSRQSLRLGGSNFEGCISNVFVQRLSLSPEVLDLTSNSLKRDVSLGGCSLNKPPFLMLLKGSTRFNKTKTFRINQLLQDTPVASPRSVKVWQDACSPLPKTQANHGALQFGDIPTSHLLFKLPQELLKPRSQFAVDMQTTSSRGLVFHTGTKNSFMALYLSKGRLVFALGTDGKKLRIKSKEKCNDGKWHTVVFGHDGEKGRLVVDGLRAREGSLPGNSTISIRAPVYLGSPPSGKPKSLPTNSFVGCLKNFQLDSKPLYTPSSSFGVSSCLGGPLEKGIYFSEEGGHVVLAHSVLLGPEFKLVFSIRPRSLTGILIHIGSQPGKHLCVYLEAGKVTASMDSGAGGTSTSVTPKQSLCDGQWHSVAVTIKQHILHLELDTDSSYTAGQIPFPPASTQEPLHLGGAPANLTTLRIPVWKSFFGCLRNIHVNHIPVPVTEALEVQGPVSLNGCPDQ

SEQ ID NO: 11 - protein, 357 aa, Homo sapiens
MGRQLAGCGDAGKKASFKMSTVHEILCKLSLEGDHSTPPSAYGSVKAYTNFDAERDALNIETAIKTKGVDEVTIVNILTNRSNAQRQDIAFAYQRRTKKELASALKSALSGHLETVILGLLKTPAQYDASELKASMKGLGTDEDSLIEIICSRTNQELQEINRVYKEMYKTDLEKDIISDTSGDFRKLMVALAKGRRAEDGSVIDYELIDQDARDLYDAGVKRKGTDVPKWISIMTERSVPHLQKVFDRYKSYSPYDMLESIRKEVKGDLENAFLNLVQCIQNKPLYFADRLYDSMKGKGTRDKVLIRIMVSRSEVDMLKIRSEFKRKYGKSLYYYIQQDTKGDYQKALLYLCGGDD

SEQ ID NO: 12 - protein, 556 aa, Homo sapiens
MELCGLGLPRPPMLLALLLATLLAAMLALLTQVALVVQVAEAARAPSVSAKPGPALWPLPLSVKMTPNLLHLAPENFYISHSPNSTAGPSCTLLEEAFRRYHGYIFGFYKWHHEPAEFQAKTQVQQLLVSITLQSECDAFPNISSDESYTLLVKEPVAVLKANRVWGALRGLETFSQLVYQDSYGTFTINESTIIDSPRFSHRGILIDTSRHYLPVKIILKTLDAMAFNKFNVLHWHIVDDQSFPYQSITFPELSNKGSYSLSHVYTPNDVRMVIEYARLRGIRVLPEFDTPGHTLSWGKGQKDLLTPCYSRQNKLDSFGPINPTLNTTYSFLTTFFKEISEVFPDQFIHLGGDEVEFKCWESNPKIQDFMRQKGFGTDFKKLESFYIQKVLDIIATINKGSIVWQEVFDDKAKLAPGTIVEVWKDSAYPEELSRVTASGFPVILSAPWYLDLISYGQDWRKYYKVEPLDFGGTQKQKQLFIGGEACLWGEYVDATNLTPRLWPRASAVGERLWSSKDVRDMDDAYDRLTRHRCRMVERGIAAQPLYAGYCNHENM

SEQ ID NO: 13 - protein, 368 aa, Homo sapiens
MWPLWRLVSLLALSQALPFEQRGFWDFTLDDGPFMMNDEEASGADTSGVLDPDSVTPTYSAMCPFGCHCHLRVVQCSDLGLKSVPKEISPDTTLLDLQNNDISELRKDDFKGLQHLYALVLVNNKISKIHEKAFSPLRKLQKLYISKNHLVEIPPNLPSSLVELRIHDNRIRKVPKGVFSGLRNMNCIEMGGNPLENSGFEPGAFDGLKLNYLRISEAKLTGIPKDLPETLNELHLDHNKIQAIELEDLLRYSKLYRLGLGHNQIRMIENGSLSFLPTLRELHLDNNKLARVPSGLPDLKLLQVVYLHSNNITKVGVNDFCPMGFGVKRAYYNGISLFNNPVPYWEVQPATFRCVTDRLAIQFGNYKK

SEQ ID NO: 14 - protein, 536 aa, Homo sapiens
MELSPRSPPEMLEESDCPSPLELKSAPSKKMWIKLRSLLRYMVKQLENGEINIEELKKNLEYTASLLEAVYIDETRQILDTEDELQELRSDAVPSEVRDWLASTFTQQARAKGRRAEEKPKFRSIVHAVQAGIFVERMFRRTYTSVGPTYSTAVLNCLKNLDLWCFDVFSLNQAADDHALRTIVFELLTRHNLISRFKIPTVFLMSFLDALETGYGKYKNPYHNQIHAADVTQTVHCFLLRTGMVHCLSEIELLAIIFAAAIHDYEHTGTTNSFHIQTKSECAIVYNDRSVLENHHISSVFRLMQDDEMNIFINLTKDEFVELRALVIEMVLATDMSCHFQQVKTMKTALQQLERIDKPKALSLLLHAADISHPTKQWLVHSRWTKALMEEFFRQGDKEAELGLPFSPLCDRTSTLVAQSQIGFIDFIVEPTFSVLTDVAEKSVQPLADEDSKSKNQPSFQWRQPSLDVEVGDPNPDVVSFRSTWVKRIQENKQKWKERAASGITNQMSIDELSPCEEEAPPSPAEDEHNQNGNLD

SEQ ID NO: 15 - protein, 146 aa, Homo sapiens
MAGELTPEEEAQYKKAFSAVDTDGNGTINAQELGAALKATGKNLSEAQLRKLISEVDSDGDGEISFQEFLTAARKARAGLEDLQVAFRAFDQDGDGHITVDELRRAMAGLGQPLPQEELDAMIREADVDQDGRVNYEEFARMLAQE

SEQ ID NO: 16 - protein, 128 aa, Homo sapiens
MGIQGGSVLFGLLLVLAVFCHSGHSLQCYNCPNPTADCKTAVNCSSDFDACLITKAGLQVYNKCWKFEHCNFNDVTTRLRENELTYYCCKKDLCNFNEQLENGGTSLSEKTVLLLVTPFLAAAWSLHP

SEQ ID NO: 17 - protein, 293 aa, Homo sapiens [sequence omitted]

SEQ ID NO: 18 - protein, 487 aa, Homo sapiens [sequence omitted]

SEQ ID NO: 19 - protein, 643 aa, Homo sapiens [sequence omitted]

SEQ ID NO: 20 - protein, 165 aa, Homo sapiens
ASGVAVSDGVIKVFNDMKVRKSSTPEEVKKRKKAVLFCLSEDKKNIILEEGKEILVGDVGQTVDDPYATFVKMLPDKDCRYALYDATYETKESKKEDLVFIFWAPESAPLKSKMIYASSKDAIKKKLTGIKHELQANCYEEVKDRCTLAEKLGGSAVISLEGKPL

SEQ ID NO: 21 - protein, 529 aa, Homo sapiens
MGSSRAPWMGRVGGHGMMALLLAGLLLPGTLAKSIGTFSDPCKDPTRITSPNDPCLTGKGDSSGFSSYSGSSSSGSSISSARSSGGGSSGSSSGSSIAQGGSAGSFKPGTGYSQVSYSSGSGSSLQGASGSSQLGSSSSHSGSSGSHSGSSSSHSSSSSSFQFSSSSFQVGNGSALPTNDNSYRGILNPSQPGQSSSSSQTSGVSSSGQSVSSNQRPCSSDIPDSPCSGGPIVSHSGPYIPSSHSVSGGQRPVVVVVDQHGSGAPGVVQGPPCSNGGLPGKPCPPITSVDKSYGGYEVVGGSSDSYLVPGMTYSKGKIYPVGYFTKENPVKGSPGVPSFAAGPPISEGKYFSSNPIIPSQSAASSAIAFQPVGTGGVQLCGGGSTGSKGPCSPSSSRVPSSSSISSSSGSPYHPCGSASQSPCSPPGTGSFSSSSSSQSSGKIILQPCGSKSSSSGHPCMSVSSLTLTGGPDGSPHPDPSAGAKPCGSSSAGKIPCRSIRDILAQVKPLGPQLADPEVFLPQGELLDSP

SEQ ID NO: 22 - protein, 201 aa, Homo sapiens
MDLSLLWVLLPLVTMAWGQYGDYGYPYQQYHDYSDDGWVNLNRQGFSYQCPQGQVIVAVRSIFSKKEGSDRQWNYACMPTPQSLGEPTECWWEEINRAGMEWYQTCSNNGLVAGFQSRYFESVLDREWQFYCCRYSKRCPYSCWLTTEYPGHYGEEMDMISYNYDYYIRGATTTFSAVERDRQWKFIMCRMTEYDCEFANV

SEQ ID NO: 23 - protein, 2612 aa, Homo sapiens
MADVDPDTLLEWLQMGQGDERDMQLIALEQLCMLLLMSDNVDRCFETCPPRTFLPALCKIFLDESAPDNVLEVTARAITYYLDVSAECTRRIVGVDGAIKALCNRLVVVELNNRTSRDLAEQCVKVLELICTRESGAVFEAGGLNCVLTFIRDSGHLVHKDTLHSAMAVVSRLCGKMEPQDSSLEICVESLSSLLKHEDHQVSDGALRCFASLADRFTRRGVDPAPLAKHGLTEELLSRMAAAGGTVSGPSSACKPGRSTTGAPSTTADSKLSNQVSTIVSLLSTLCRGSPVVTHDLLRSELPDSIESALQGDERCVLDTMRLVDLLLVLLFEGRKALPKSSAGSTGRIPGLRRLDSSGERSHRQLIDCIRSKDTDALIDAIDTGAFEVNFMDDVGQTLLNWASAFGTQEMVEFLCERGADVNRGQRSSSLHYAACFGRPQVAKTLLRHGANPDLRDEDGKTPLDKARERGHSEVVAILQSPGDWMCPVNKGDDKKKKDTNKDEEECNEPKGDPEMAPIYLKRLLPVFAQTFQQTMLPSIRKASLALIRKMIHFCSEALLQEVCDSDVGHNLPTILVEITATVLDQEDDDDGHLLALQIIRDIVDKGGDIYKHQLARLGVISKVSTLAGPSSDDENEEESKPEKEDEPQEDAQELQQGKPYHWRDWSIIRGRDCLYIWSDAAALELSNGSNGWFRFILDGKLATMYSSGSPEGGSDSSESRSEFLEKLQRARGQVKPSTSSQPILSAPGPTKLTVGNWSLTCLKEGEIAIHNSDGQQATILKEDLPGFVFESNRGTKHSFTAETSLGSEFVTGWTGKRGRKLKSKLEKTKQKVRTMARDLYDDHFKAVESMPRGVVVTLRNIATQLESSWELHTNRQCIESENTWRDLMKTALKNLIVLLKDENTISPYEMCSSGLVQALLTVLNNVSIFRATKQKQNEVPKVILSVFKTAFTENEDDESRPAVALIRKLIAVLESIERLPLHLYDTPGSTYNLQILTRRLRFRLERAPGETALIDRTGRMLKMEPLATVESLEQYLLKMVAKQWYDFDRSSFVFVRKLREGQNFIFRHQHDFDENGIIYWIGTNAKTAYEWVNPAAYGLVVVTSSEGRNLPYGRLEDILSRDNSALNCHSNDDKNAWFAIDLGLWVIPSAYTLRHARGYGRSALRNWVFQVSKDGQNWTSLYTHVDDCSLNEPGSTATWPLDPPKDEKQGWRHVRIKQMGKNASGQTHYLSLSGFELYGTVNGVCEDQLGKAAKEAEANLRRQRRLVRSQVLKYMVPGARVIRGLDWKWRDQDGSPQGEGTVTGELHNGWIDVTWDAGGSNSYRMGAEGKFDLKLAPGYDPDTVASPKPVSSTVSGTTQSWSSLVKNNCPDKTSAAAGSSSRKGSSSSVCSVASSSDISLGSTKTERRSEIVMEHSIVSGADVHEPIVVLSSAENVPQTEVGSSSSASTSTLTAETGSENAERKLGPDSSVRTPGESSAISMGIVSVSSPDVSSVSELTNKEAASQRPLSSSASNRLSVSSLLAAGAPMSSSASVPNLSSRETSSLESFVRRVANIARTNATNNMNLSRSSSDNNTNTLGRNVMSTATSPLMGAQSFPNLTTPGTTSTVTMSTSSVTSSSNVATATTVLSVGQSLSNTLTTSLTSTSSESDTGQEAEYSLYDFLDSCRASTLLAELDDDEDLPEPDEEDDENEDDNQEDQEYEEVMILRRPSLQRRAGSRSDVTHHAVTSQLPQVPAGAGSRPIGEQEEEEYETKGGRRRTWDDDYVLKRQFSALVPAFDPRPGRTNVQQTTDLEIPPPGTPHSELLEEVECTPSPRLALTLKVTGLGTTREVELPLTNFRSTIFYYVQKLLQLSCNGNVKSDKLRRIWEPTYTIMYREMKDSDKEKENGKMGCWSIEHVEQYLGTDELPKNDLITYLQKNADAAFLRHWKLTGTNKSIRKNRNCSQLIAAYKDFCEHGTKSGLNQGAISTLQSSDILNLTKEQPQAKAGNGQNSCGVEDVLQLLRILYIVASDPYSRISQEDGDEQPQFTFPPDEFTSKKITTKILQQIEEPLALASGALPDWCEQLTSKCPFLIPFETRQLYFTCTAFGASRAIVWLQNRREATVERTRTTSSVRRDDPGEFRVGRLKHERVKVPRGESLMEWAENVMQIHADRKSVLEVEFLGEEGTGLGPTLEFYALVAAEFQRTDLGAWLCDDNFPDDESRHVDLGGGLKPPGYYVQRSCGLFTAPFPQDSDELERITKLFHFLGIFLAKCIQDNRLVDLPISKPFFKLMCMGDIKSNMSKLIYESRGDRDLHCTESQSEASTEEGHDSLSVGSFEEDSKSEFILDPPKPKPPAWFNGILTWEDFELVNPHRARFLKEIKDLAIKRRQILSNKGLSEDEKNTKLQELVLKNPSGSGPPLSIEDLGLNFQFCPSSRIYGFTAVDLKPSGEDEMITMDNAEEYVDLMFDFCMHTGIQKQMEAFRDGFNKVFPMEKLSSFSHEEVQMILCGNQSPSWAAEDIINYTEPKLGYTRDSPGFLRFVRVLCGMSSDERKAFLQFTTGCSTLPPGGLANLHPRLTVVRKVDATDASYPSVNTCVHYLKLPEYSSEEIMRERLLAATMEKGFHLN

SEQ ID NO: 24 - protein, 275 aa, Homo sapiens
MLGGVTLKLFYLLPRTAASGARSRPEPGTQVRSLNFRMLTTLLPILLLSGWAFCSQDASDGLQRLHMLQISYFRDPYHVWYQGNASLGGHLTHVLEGPDTNTTIIQLQPLQEPESWARTQSGLQSYLLQFHGLVRLVHQERTLAFPLTIRCFLGCELPPEGSRAHVFFEVAVNGSSFVSFRPERALWQADTQVTSGVVTFTLQQLNAYNRTRYELREFLEDTCVQYVQKHISAENTKGSQTSRSYTSLVLGVLVGSFIIAGVAVGIFLCTGGRRC

SEQ ID NO: 25 - protein, 182 aa, Homo sapiens
TTASTSQVRQNYHQDSEAAINRQINLELYASYVYLSMSYYFDRDDVALKNFAKYFLHQSHEEREHAEKLMKLQNQRGGRIFLQDIKKPDCDDWESGLNAMECALHLEKNVNQSLLELHKLATDKNDPHLCDFIETHYLNEQVKAIKELGDHVTNLRKMGAPESGLAEYLFDKHTLGDSDNES

SEQ ID NO: 26 - protein, 191 aa, Homo sapiens
MSSQIRQNYSTDVEAAVNSLVNLYLQASYTYLSLGFYFDRDDVALEGVSHFFRELAEEKREGYERLLKMQNQRGGRALFQDIKKPAEDEWGKTPDAMKAAMALEKKLNQALLDLHALGSARTDPHLCDFLETHFLDEEVKLIKKMGDHLTNLHRLGGPEAGLGEYLSSKGSLSSTTKSLLSPATSEGPLAK

SEQ ID NO: 27 - protein, 382 aa, Homo sapiens
MGLLLPLALCILVLCCGAMSPPQLALNPSALLSRGCNDSDVLAVAGFALRDINKDRKDGYVLRLNRVNDAQEYRRGGLGSLFYLTLDVLETDCHVLRKKAWQDCGMRIFFESVYGQCKAIFYMNNPSRVLYLAAYNCTLRPVSKKKIYMTCPDCPSSIPTDSSNHQVLEAATESLAKYNNENTSKQYSLFKVTRASSQWVVGPSYFVEYLIKESPCTKSQASSCSLQSSDSVPVGLCKGSLTRTHWEKFVSVTCDFFESQAPATGSENSAVNQKPTNLPKVEESQQKNTPPTDSPSKAGPRGSVQYLPDLDDKNSQEKGPQEAFPVHLDLTTNPQGETLDISFLFLEPMEEKLVVLPFPKEKARTAECPGPAQNASPLVLPP

SEQ ID NO: 28 - protein, 2330 aa, Homo sapiens
MLRGPGPGLLLLAVQCLGTAVPSTGASKSKRQAQQMVQPQSPVAVSQSKPGCYDNGKHYQINQQWERTYLGNALVCTCYGGSRGFNCESKPEAEETCFDKYTGNTYRVGDTYERPKDSMIWDCTCIGAGRGRISCTIANRCHEGGQSYKIGDTWRRPHETGGYMLECVCLGNGKGEWTCKPIAEKCFDHAAGTSYVVGETWEKPYQGWMMVDCTCLGEGSGRITCTSRNRCNDQDTRTSYRIGDTWSKKDNRGNLLQCICTGNGRGEWKCERHTSVQTTSSGSGPFTDVRAAVYQPQPHPQPPPYGHCVTDSGVVYSVGMQWLKTQGNKQMLCTCLGNGVSCQETAVTQTYGGNSNGEPCVLPFTYNGRTFYSCTTEGRQDGHLWCSTTSNYEQDQKYSFCTDHTVLVQTRGGNSNGALCHFPFLYNNHNYTDCTSEGRRDNMKWCGTTQNYDADQKFGFCPMAAHEEICTTNEGVMYRIGDQWDKQHDMGHMMRCTCVGNGRGEWTCIAYSQLRDQCIVDDITYNVNDTFHKRHEEGHMLNCTCFGQGRGRWKCDPVDQCQDSETGTFYQIGDSWEKYVHGVRYQCYCYGRGIGEWHCQPLQTYPSSSGPVEVFITETPSQPNSHPIQWNAPQPSHISKYILRWRPKNSVGRWKEATIPGHLNSYTIKGLKPGVVYEGQLISIQQYGHQEVTRFDFTTTSTSTPVTSNTVTGETTPFSPLVATSESVTEITASSFVVSWVSASDTVSGFRVEYELSEEGDEPQYLDLPSTATSVNIPDLLPGRKYIVNVYQISEDGEQSLILSTSQTTAPDAPPDPTVDQVDDTSIVVRWSRPQAPITGYRIVYSPSVEGSSTELNLPETANSVTLSDLQPGVQYNITIYAVEENQESTPVVIQQETTGTPRSDTVPSPRDLQFVEVTDVKVTIMWTPPESAVTGYRVDVIPVNLPGEHGQRLPISRNTFAEVTGLSPGVTYYFKVFAVSHGRESKPLTAQQTTKLDAPTNLQFVNETDSTVLVRWTPPRAQITGYRLTVGLTRRGQPRQYNVGPSVSKYPLRNLQPASEYTVSLVAIKGNQESPKATGVFTTLQPGSSIPPYNTEVTETTIVITWTPAPRIGFKLGVRPSQGGEAPREVTSDSGSIVVSGLTPGVEYVYTIQVLRDGQERDAPIVNKVVTPLSPPTNLHLEANPDTGVLTVSWERSTTPDITGYRITTTPTNGQQGNSLEEVVHADQSSCTFDNLSPGLEYNVSVYTVKDDKESVPISDTIIPAVPPPTDLRFTNIGPDTMRVTWAPPPSIDLTNFLVRYSPVKNEEDVAELSISPSDNAVVLTNLLPGTEYVVSVSSVYEQHESTPLRGRQKTGLDSPTGIDFSDITANSFTVHWIAPRATITGYRIRHHPEHFSGRPREDRVPHSRNSITLTNLTPGTEYVVSIVALNGREESPLLIGQQSTVSDVPRDLEVVAATPTSLLISWDAPAVTVRYYRITYGETGGNSPVQEFTVPGSKSTATISGLKPGVDYTITVYAVTGRGDSPASSKPISINYRTEIDKPSQMQVTDVQDNSISVKWLPSSSPVTGYRVTTTPKNGPGPTKTKTAGPDQTEMTIEGLQPTVEYVVSVYAQNPSGESQPLVQTAVTNIDRPKGLAFTDVDVDSIKIAWESPQGQVSRYRVTYSSPEDGIHELFPAPDGEEDTAELQGLRPGSEYTVSVVALHDDMESQPLIGTQSTAIPAPTDLKFTQVTPTSLSAQWTPPNVQLTGYRVRVTPKEKTGPMKEINLAPDSSSVVVSGLMVATKYEVSVYALKDTLTSRPAQGVVTTLENVSPPRRARVTDATETTITISWRTKTETITGFQVDAVPANGQTPIQRTIKPDVRSYTITGLQPGTDYKIYLYTLNDNARSSPVVIDASTAIDAPSNLRFLATTPNSLLVSWQPPRARITGYIIKYEKPGSPPREVVPRPRPGVTEATITGLEPGTEYTIYVIALKNNQKSEPLIGRKKTVQKTPFVTHPGYDTGNGIQLPGTSGQQPSVGQQMIFEEHGFRRTTPPTTATPIRHRPRPYPPNVGQEALSQTTISWAPFQDTSEYIISCHPVGTDEEPLQFRVPGTSTSATLTGLTRGATYNIIVEALKDQQRHKVREEVVTVGNSVNEGLNQPTDDSCFDPYTVSHYAVGDEWERMSESGFKLLCQCLGFGSGHFRCDSSRWCHDNGVNYKIGEKWDRQGENGQMMSCTCLGNGKGEFKCDPHEATCYDDGKTYHVGEQWQKEYLGAICSCTCFGGQRGWRCDNCRRPGGEPSPEGTTGQSYNQYSQRYHQRTNTNVNCPIECFMPLDVQADREDSRE

SEQ ID NO: 29 - protein, 363 aa, Homo sapiens
PHSYPALSAEQKKELSDIALRIVAPGKGILAADESVGSMAKRLSQIGVENTEENRRLYRQVLFSADDRVKKCIGGVIFFHETLYQKDDNGVPFVRTIQDKGIVVGIKVDKGVVPLAGTDGETTTQGLDGLSERCAQYKKDGADFAKWRCVLKISERTPSALAILENANVLARYASICQQNGIVPIVEPEILPDGDHDLKRCQYVTEKVLAAVYKALSDHHVYLEGTLLKPNMVTPGHACPIKYTPEEIAMATVTALRRTVPPAVPGVTFLSGGQSEEEASFNLNAINRCPLPRPWALTFSYGRALQASALNAWRGQRDNAGAATEEFIKRAEVNGLAAQGKYEGSGEDGGAAAQSLYIANHAY

SEQ ID NO: 30 - protein, 318 aa, Homo sapiens
MASPGCLLCVLGLLLCGAASLELSRPHGDTAKKPIIGILMQKCRNKVMKNYGRYYIAASYVKYLESAGARVVPVRLDLTEKDYEILFKSINGILFPGGSVDLRRSDYAKVAKIFYNLSIQSFDDGDYFPVWGTCLGFEELSLLISGECLLTATDTVDVAMPLNFTGGQLHSRMFQNFPTELLLSLAVEPLTANFHKWSLSVKNFTMNEKLKKFFNVLTTNTDGKIEFISTMEGYKYPVYGVQWHPEKAPYEWKNLDGISHAPNAVKTAFYLAEFFVNEARKNNHHFKSESEEEKALIYQFSPIYTGNISSFQQCYIFD

SEQ ID NO: 31 - protein, 185 aa, Homo sapiens
MKFTIVFAGLLGVFLAPALANYNINVNDDNNNAGSGQQSVSVNNEHNVANVDNNNGWDSWNSIWDYGNGFAATRLFQKKTCIVHKMNKEVMPSIQSLDALVKEKKLQGKGPGGPPPKGLMYSVNPNKVDDLSKFGKNIANMCRGIPTYMAEEMQEASLFFYSGTCYTTSVLWIVDISFCGDTVEN

SEQ ID NO: 32 - protein, 375 aa, Homo sapiens
MQKLQLCVYIYLFMLIVAGPVDLNENSEQKENVEKEGLCNACTWRQNTKSSRIEAIKIQILSKLRLETAPNISKDVIRQLLPKAPPLRELIDQYDVQRDDSSDGSLEDDDYHATTETIITMPTESDFLMQVDGKPKCCFFKFSSKIQYNKVVKAQLWIYLRPVETPTTVFVQILRLIKPMKDGTRYTGIRSLKLDMNPGTGIWQSIDVKTVLQNWLKQPESNLGIEIKALDENGHDLAVTFPGPGEDGLNPFLEVKVTDTPKRSRRDFGLDCDEHSTESRCCRYPLTVDFEAFGWDWIIAPKRYKANYCSGECEFVFLQKYPHTHLVHQANPRGSAGPCCTPTKMSPINMLYFNGKEQIIYGKIPAMVVDRCGCS

SEQ ID NO: 33 - protein, 655 aa, Homo sapiens
MGRWAWVPSPWPPPGLGPFLLLLLLLLLLPRGFQPQPGGNRTESPEPNATATPAIPTILVTSVTSETPATSAPEAEGPQSGGLPPPPRAVPSSSSPQAQALTEDGRPCRFPFRYGGRMLHACTSEGSAHRKWCATTHNYDRDRAWGYCVEATPPPGGPAALDPCASGPCLNGGSCSNTQDPQSYHCSCPRAFTGKDCGTEKCFDETRYEYLEGGDRWARVRQGHVEQCECFGGRTWCEGTRHTACLSSPCLNGGTCHLIVATGTTVCACPPGFAGRLCNIEPDERCFLGNGTGYRGVASTSASGLSCLAWNSDLLYQELHVDSVGAAALLGLGPHAYCRNPDNDERPWCYVVKDSALSWEYCRLEACESLTRVQLSPDLLATLPEPASPGRQACGRRHKKRTFLRPRIIGGSSSLPGSHPWLAAIYIGDSFCAGSLVHTCWVVSAAHCFSHSPPRDSVSVVLGQHFFNRTTDVTQTFGIEKYIPYTLYSVFNPSDHDLVLIRLKKKGDRCATRSQFVQPICLPEPGSTFPAGHKCQIAGWGHLDENVSGYSSSLREALVPLVADHKCSSPEVYGADISPNMLCAGYFDCKSDACQGDSGGPLACEKNGVAYLYGIISWGDGCGRLHKPGVYTRVANYVDWINDRIRPPRRLVAPS

SEQ ID NO: 34 - protein, 2850 aa, Homo sapiens
MPKLLQGVITVIDVFYQYATQHGEYDTLNKAELKELLENEFHQILKNPNDPDTVDIILQSLDRDHNKKVDFTEYLLMIFKLVQARNKIIGKDYCQVSGSKLRDDTHQHQEEQEETEKEENKRQESSFSHSSWSAGENDSYSRNVRGSLKPGTESISRRLSFQRDFSGQHNSYSGQSSSYGEQNSDSHQSSGRGQCGSGSGQSPNYGQHGSGSGQSSSNDTHGSGSGQSSGFSQHKSSSGQSSGYSQHGSGSGHSSGYGQHGSRSGQSSRGERHRSSSGSSSSYGQHGSGSRQSLGHGRQGSGSRQSPSHVRHGSGSGHSSSHGQHGSGSSYSYSRGHYESGSGQTSGFGQHESGSGQSSGYSKHGSGSGHSSSQGQHGSTSGQASSSGQHGSSSRQSSSYGQHESASRHSSGRGQHSSGSGQSPGHGQRGSGSGQSPSSGQHGTGFGRSSSSGPYVSGSGYSSGFGHHESSSEHSSGYTQHGSGSGHSSGHGQHGSRSGQSSRGERQGSSAGSSSSYGQHGSGSRQSLGHSRHGSGSGQSPSPSRGRHESGSRQSSSYGPHGYGSGRSSSRGPYESGSGHSSGLGHQESRSGQSSGYGQHGSSSGHSSTHGQHGSTSGQSSSCGQHGATSGQSSSHGQHGSGSSQSSRYGQQGSGSGQSPSRGRHGSDFGHSSSYGQHGSGSGWSSSNGPHGSVSGQSSGFGHKSGSGQSSGYSQHGSGSSHSSGYRKHGSRSGQSSRSEQHGSSSGLSSSYGQHGSGSHQSSGHGRQGSGSGHSPSRVRHGSSSGHSSSHGQHGSGTSCSSSCGHYESGSGQASGFGQHESGSGQGYSQHGSASGHFSSQGRHGSTSGQSSSSGQHDSSSGQSSSYGQHESASHHASGRGRHGSGSGQSPGHGQRGSGSGQSPSYGRHGSGSGRSSSSGRHGSGSGQSSGFGHKSSSGQSSGYTQHGSGSGHSSSYEQHGSRSGQSSRSEQHGSSSGSSSSYGQHGSGSRQSLGHGQHGSGSGQSPSPSRGRHGSGSGQSSSYGPYRSGSGWSSSRGPYESGSGHSSGLGHRESRSGQSSGYGQHGSSSGHSSTHGQHGSTSGQSSSCGQHGASSGQSSSHGQHGSGSSQSSGYGRQGSGSGQSPGHGQRGSGSRQSPSYGRHGSGSGRSSSSGQHGSGLGESSGFGHHESSSGQSSSYSQHGSGSGHSSGYGQHGSRSGQSSRGERHGSSSGSSSHYGQHGSGSRQSSGHGRQGSGSGHSPSRGRHGSGLGHSSSHGQHGSGSGRSSSRGPYESRSGHSSVFGQHESGSGHSSAYSQHGSGSGHFCSQGQHGSTSGQSSTFDQEGSSTGQSSSYGHRGSGSSQSSGYGRHGAGSGQSPSRGRHGSGSGHSSSYGQHGSGSGWSSSSGRHGSGSGQSSGFGHHESSSWQSSGCTQHGSGSGHSSSYEQHGSRSGQSSRGERHGSSSGSSSSYGQHGSGSRQSLGHGQHGSGSGQSPSPSRGRHGSGSGQSSSYSPYGSGSGWSSSRGPYESGSSHSSGLGHRESRSGQSSGYGQHGSSSGHSSTHGQHGSTSGQSSSCGQHGASSGQSSSHGQHGSGSSQSSGYGRQGSGSGQSPGHGQRGSGSRQSPSYGRHGSGSGRSSSSGQHGSGLGESSGFGHHESSSGQSSSYSQHGSGSGHSSGYGQHGSRSGQSSRGERHGSSSRSSSRYGQHGSGSRQSSGHGRQGSGSGQSPSRGRHGSGLGHSSSHGQHGSGSGRSSSRGPYESRSGHSSVFGQHESGSGHSSAYSQHGSGSGHFCSQGQHGSTSGQSSTFDQEGSSTGQSSSHGQHGSGSSQSSSYGQQGSGSGQSPSRGRHGSGSGHSSSYGQHGSGSGWSSSSGRHGSGSGQSSGFGHHESSSWQSSGYTQHGSGSGHSSSYEQHGSRSGQSSRGEQHGSSSGSSSSYGQHGSGSRQSLGHGQHGSGSGQSPSPSRGRHGSGSGQSSSYGPYGSGSGWSSSRGPYESGSGHSSGLGHRESRSGQSSGYGQHGSSSGHSSTHGQHGSASGQSSSCGQHGASSGQSSSHGQHGSGSSQSSGYGRQGSGSGQSPGHGQRGSGSRQSPSYGRHGSGSGRSSSSGQHGPGLGESSGFGHHESSSGQSSSYSQHGSGSGHSSGYGQHGSRSGQSSRGERHGSSSGSSSRYGQHGSGSRQSSGHGRQGSGSGHSPSRGRHGSGSGHSSSHGQHGSGSGRSSSRGPYESRSGHSSVFGQHESGSGHSSAYSQHGSGSGHFCSQGQHGSTSGQSSTFDQEGSSTGQSSSHGQHGSGSSQSSSYGQQGSGSGQSPSRGRHGSGSGHSSSYGQHGSGSGWSSSSGRHGSGSGQSSGFGHHESSSWQSSGYTQHGSGSGHSSSYEQHGSRSGQSSRGERHGSSSGSSSSYGQHGSGSRQSLGHGQHGSGSGQSPSPSRGRHGSGSGQSSSYSPYGSGSGWSSSRGPYESGSGHSSGLGHRESRSGQSSGYGQHGSSSGHSSTHGQHGSTSGQSSSCGQHGASSGQSSSHGQHGSGSSQSSGYGRQGSGSGQSPGHGQRGSGSRQSPSYGRHGSGSGRSSSSGQHGSGLGESSGFGHHESSSGQSSSYSQHGSGSGHSSGYGQHGSRSGQSSRGERHGSSSGSSSHYGQHGSGSRQSSGHGRQGSGSGQSPSRGRHGSGLGHSSSHGQHGSGSGRSSSRGPYESRLGHSSVFGQHESGSGHSSAYSQHGSGSGHFCSQGQHGSTSGQSSTFDQEGSSTGQSSSYGHRGSGSSQSSGYGRHGAGSGQSLSHGRHGSGSGQSSSYGQHGSGSGQSSGYSQHGSGSGQDGYSYCKGGSNHDGGSSGSYFLSFPSSTSPYEYVQEQRCYFYQ

SEQ ID NO: 35 - protein, 217 aa, Homo sapiens
ATRSPGVVISDDEPGYDLDLFCIPNHYAEDLERVFIPHGLIMDRTERLARDVMKEMGGHHIVALCVLKGGYKFFADLLDYIKALNRNSDRSIPMTVDFIRLKSYCNDQSTGDIKVIGGDDLSTLTGKNVLIVEDIIDTGKTMQTLLSLVRQYNPKMVKVASLLVKRTPRSVGYKPDFVGFEIPDKFVVGYALDYNEYFRDLNHVCVISETGKAKYKA

SEQ ID NO: 36 - protein, 275 aa, Homo sapiens
MSSFGYRTLTVALFTLICCPGSDEKVFEVHVRPKKLAVEPKGSLEVNCSTTCNQPEVGGLETSLDKILLDEQAQWKHYLVSNISHDTVLQCHFTCSGKQESMNSNVSVYQPPRQVILTLQPTLVAVGKSFTIECRVPTVEPLDSLTLFLFRGNETLHYETFGKAAPAPQEATATFNSTADREDGHRNFSCLAVLDLMSRGGNIFHKHSAPKMLEIYEPVSDSQMVIIVTVVSVLLSLFVTSVLLCFIFGQHLRQQRMGTYGVRAAWRRLPQAFRP

SEQ ID NO: 37 - protein, 322 aa, Homo sapiens
MSAKSRTIGIIGAPFSKGQPRGGVEEGPTVLRKAGLLEKLKEQECDVKDYGDLPFADIPNDSPFQIVKNPRSVGKASEQLAGKVAEVKKNGRISLVLGGDHSLAIGSISGHARVHPDLGVIWVDAHTDINTPLTTTSGNLHGQPVSFLLKELKGKIPDVPGFSWVTPCISAKDIVYIGLRDVDPGEHYILKTLGIKYFSMTEVDRLGIGKVMEETLSYLLGRKKRPIHLSFDVDGLDPSFTPATGTPVVGGLTYREGLYITEEIYKTGLLSGLDIMEVNPSLGKTPEEVTRTVNTAVAITLACFGLAREGNHKPIDYLNPPK

SEQ ID NO: 38 - protein, 1026 aa, Homo sapiens
MRLPWELLVLQSFILCLADDSTLHGPIFIQEPSPVMFPLDSEEKKVKLNCEVKGNPKPHIRWKLNGTDVDTGMDFRYSVVEGSLLINNPNKTQDAGTYQCTATNSFGTIVSREAKLQFAYLDNFKTRTRSTVSVRRGQGMVLLCGPPPHSGELSYAWIFNEYPSYQDNRRFVSQETGNLYIAKVEKSDVGNYTCVVTNTVTNHKVLGPPTPLILRNDGVMGEYEPKIEVQFPETVPTAKGATVKLECFALGNPVPTIIWRRADGKPIARKARRHKSNGILEIPNFQQEDAGLYECVAENSRGKNVARGQLTFYAQPNWIQKINDIHVAMEENVFWECKANGRPKPTYKWLKNGEPLLTRDRIQIEQGTLNITIVNLSDAGMYQCLAENKHGVIFSNAELSVIAVGPDFSRTLLKRVTLVKVGGEVVIECKPKASPKPVYTWKKGRDILKENERITISEDGNLRIINVTKSDAGSYTCIATNHFGTASSTGNLVVKDPTRVMVPPSSMDVTVGESIVLPCQVTHDHSLDIVFTWSFNGHLIDFDRDGDHFERVGGQDSAGDLMIRNIQLKHAGKYVCMVQTSVDRLSAAADLIVRGPPGPPEAVTIDEITDTTAQLSWRPGPDNHSPITMYVIQARTPFSVGWQAVSTVPELIDGKTFTATVVGLNPWVEYEFRTVAANVIGIGEPSRPSEKRRTEEALPEVTPANVSGGGGSKSELVITWETVPEELQNGRGFGYVVAFRPYGKMIWMLTVLASADASRYVFRNESVHPFSPFEVKVGVFNNKGEGPFSPTTVVYSAEEEPTKPPASIFARSLSATDIEVFWASPLEKNRGRIQGYEVKYWRHEDKEENARKIRTVGNQTSTKITNLKGSVLYHLAVKAYNSAGTGPSSATVNVTTRKPPPSQPPGNIIWNSSDSKIILNWDQVKALDNESEVKGYKVLYRWNRQSSTSVIETNKTSVELSLPFDEDYIIEIKPFSDGGDGSSSEQIRIPKISNAYARGSGASTSNACTLSAISTIMISLTARSSL

SEQ ID NO: 39 - protein, 224 aa, Homo sapiens
MEKLLCFLVLTSLSHAFGQTDMSRKAFVFPKESDTSYVSLKAPLTKPLKAFTVCLHFYTELSSTRGYSIFSYATKRQDNEILIFWSKDIGYSFTVGGSEILFEVPEVTVAPVHICTSWESASGIVEFWVDGKPRVRKSLKKGYTVGAEASIILGQEQDSFGGNFEGSQSLVGDIGNVNMWDFVLSPDEINTIYLGGPFSPNVLNWRALKYEVQGEVFTKPQLWP

SEQ ID NO: 40 - protein, 299 aa, Homo sapiens
MDLLWILPSLWLLLLGGPACLKTQEHPSCPGPRELEASKVVLLPSCPGAPGSPGEKGAPGPQGPPGPPGKMGPKGEPGDPVNLLRCQEGPRNCRELLSQGATLSGWYHLCLPEGRALPVFCDMDTEGGGWLVFQRRQDGSVDFFRSWSSYRAGFGNQESEFWLGNENLHQLTLQGNWELRVELEDFNGNRTFAHYATFRLLGEVDHYQLALGKFSEGTAGDSLSLHSGRPFTTYDADHDSSNSNCAVIVHGAWWYASCYRSNLNGRYAVSEAAAHKYGIDWASGRGVGHPYRRVRMMLR

SEQ ID NO: 41 - protein, 686 aa, Homo sapiens
MRLLTLLGLLCGSVATPLGPKWPEPVFGRLASPGFPGEYANDQERRWTLTAPPGYRLRLYFTHFDLELSHLCEYDFVKLSSGAKVLATLCGQESTDTERAPGKDTFYSLGSSLDITFRSDYSNEKPFTGFEAFYAAEDIDECQVAPGEAPTCDHHCHNHLGGFYCSCRAGYVLHRNKRTCSALCSGQVFTQRSGELSSPEYPRPYPKLSSCTYSISLEEGFSVILDFVESFDVETHPETLCPYDFLKIQTDREEHGPFCGKTLPHRIETKSNTVTITFVTDESGDHTGWKIHYTSTAHACPYPMAPPNGHVSPVQAKYILKDSFSIFCETGYELLQGHLPLKSFTAVCQKDGSWDRPMPACSIVDCGPPDYLPSGRVEYITGPGVTTYKAVIQYSCEETFYTMKVNDGKYVCEADGFWTSSKGEKSLPVCEPVCGLSARTTGGRIYGGQKAKPGDFPWQVLILGGTTAAGALLYDNWVLTAAHAVYEQKHDASALDIRMGTLKRLSPHYTQAWSEAVFIHEGYTHDAGFDNDIALIKLNNKVVINSNITPICLPRKEAESFMRTDDIGTASGWGLTQRGFLARNLMYVDIPIVDHQKCTAAYEKPPYPRGSVTANMLCAGLESGGKDSCRGDSGGALVFLDSETERWFVGGIVSWGSMNCGEAGQYGVYTKVINYIPWIENIISDF

SEQ ID NO: 42 - protein, 2386 aa, Homo sapiens
MVVYGGNVHTHYQEEKCYEDGIFFYHLGCHQWVSGAELAPPGTPEGRAAPPSGRYSHVAAVLGGSVLLVAGGYSGRPRGDLMAYKVPPFVFQAPAPDYHLDYCSMYTDHSVCSRDPECSWCQGACQAAPPPGTPLGACPAASCLGLGRLLGDCQACLAFSSPTAPPRGPGTLGWCVHNESCLPRPEQARCRGEQISGTVGWWGPAPVFVTSLEACVTQSFLPGLHLLTFQQPPNTSQPDKVSIVRSTTITLTPSAETDVSLVYRGFIYPMLPGGPGGPGAEDVAVWTRAQRLHVLARMARGPDTENMEEVGRWVAHQEKETRRLQRPGSARLFPLPGRDHKYAVEIQGQLNGSAGPGHSELTLLWDRTGVPGGSEISFFFLEPYRSSSCTSYSSCLGCLADQGCGWCLTSATCHLRQGGAHCGDDGAGGSLLVLVPTLCPLCEEHRDCHACTQDPFCEWHQSTSRKGDAACSRRGRGRGALKSPEECPPLCSQRLTCEDCLANSSQCAWCQSTHTCFLFAAYLARYPHGGCRGWDDSVHSEPRCRSCDGFLTCHECLQSHECGWCGNEDNPTLGRCLQGDFSGPLGGGNCSLWVGEGLGLPVALPARWAYARCPDVDECRLGLARCHPRATCLNTPLSYECHCQRGYQGDGISHCNRTCLEDCGHGVCSGPPDFTCVCDLGWTSDLPPPTPAPGPPAPRCSRDCGCSFHSHCRKRGPGFCDECQDWTWGEHCERCRPGSFGNATGSRGCRPCQCNGHGDPRRGHCDNLSGLCFCQDHTEGAHCQLCSPGYYGDPRAGGSCFRECGGRALLTNVSSVALGSRRVGGLLPPGGGAARAGPGLSYCVWVVSATEELQPCAPGTLCPPLTLTFSPDSSTPCTLSYVLAFDGFPRFLDTGVVQSDRSLIAAFCGQRRDRPLTVQALSGLLVLHWEANGSSSWGFNASVGSARCGSGGPGSCPVPQECVPQDGAAGAGLCRCPQGWAGPHCRMALCPENCNAHTGAGTCNQSLGVCICAEGFGGPDCATKLDGGQLVWETLMDSRLSADTASRFLHRLGHTMVDGPDATLWMFGGLGLPQGLLGNLYRYSVSERRWTQMLAGAEDGGPGPSPRSFHAAAYVPAGRGAMYLLGGLTAGGVTRDFWVLNLTTLQWRQEKAPQTVELPAVAGHTLTARRGLSLLLVGGYSPENGFNQQLLEYQLATGTWVSGAQSGTPPTGLYGHSAVYHEATDSLYVFGGFRFHVELAAPSPELYSLHCPDRTWSLLAPSQGAKRDRMRNVRGSSRGLGQVPGEQPGSWGFREVRKKMALWAALAGTGGFLEEISPHLKEPRPRLFHASALLGDTMVVLGGRSDPDEFSSDVLLYQVNCNAWLLPDLTRSASVGPPMEESVAHAVAAVGSRLYISGGFGGVALGRLLALTLPPDPCRLLSSPEACNQSGACTWCHGACLSGDQAHRLGCGGSPCSPMPRSPEECRRLRTCSECLARHPRTLQPGDGEASTPRCKWCTNCPEGACIGRNGSCTSENDCRINQREVFWAGNCSEAACGAADCEQCTREGKCMWTRQFKRTGETRRILSVQPTYDWTCFSHSLLNVSPMPVESSPPLPCPTPCHLLPNCTSCLDSKGADGGWQHCVWSSSLQQCLSPSYLPLRCMAGGCGRLLRGPESCSLGCAQATQCALCLRRPHCGWCAWGGQDGGGRCMEGGLSGPRDGLTCGRPGASWAFLSCPPEDECANGHHDCNETQNCHDQPHGYECSCKTGYTMDNMTGLCRPVCAQGCVNGSCVEPDHCRCHFGFVGRNCSTECRCNRHSECAGVGARDHCLLCRNHTKGSHCEQCLPLFVGSAVGGGTCRPCHAFCRGNSHICISRKELQMSKGEPKKYSLDPEEIENWVTEGPSEDEAVCVNCQNNSYGEKCESCLQGYFLLDGKCTKCQCNGHADTCNEQDGTGCPCQNNTETGTCQGSSPSDRRDCYKYQCAKCRESFHGSPLGGQQCYRLISVEQECCLDPTSQTNCFHEPKRRALGPGRTVLFGVQPKFTNVDIRLTLDVTFGAVDLYVSTSYDTFVVRVAPDTGVHTVHIQPPPAPPPPPPPADGGPRGAGDPGGAGASSGPGAPAEPRVREVWPRGLITYVTVTEPSAVLVVRGVRDRLVITYPHEHHALKSSRFYLLLLGVGDPSGPGANGSADSQGLLFFRQDQAHIDLFVFFSVFFSCFFLFLSLCVLLWKAKQALDQRQEQRRHLQEMTKMASRPFAKVTVCFPPDPTAPASAWKPAGLPPPAFRRSEPFLAPLLLTGAGGPWGPMGGGCCPPAIPATTAGLRAGPITLEPTEDGMAGVATLLLQLPGGPHAPNGACLGSALVTLRHRLHEYCGGGGGAGGSGHGTGAGRKGLLSQDNLTSMSL

SEQ ID NO: 43 - protein, 840 aa, Homo sapiens [sequence omitted]

SEQ ID NO: 44 - protein, 493 aa, Homo sapiens
MALFGALFLALLAGAHAEFPGCKIRVTSKALELVKQEGLRFLEQELETITIPDLRGKEGHFYYNISEVKVTELQLTSSELDFQPQQELMLQITNASLGLRFRRQLLYWFFYDGGYINASAEGVSIRTGLELSRDPAGRMKVSNVSCQASVSRMHAAFGGTFKKVYDFLSTFITSGMRFLLNQQICPVLYHAGTVLLNSLLDTVPVRSSVDELVGIDYSLMKDPVASTSNLDMDFRGAFFPLTERNWSLPNRAVEPQLQEEERMVYVAFSEFFFDSAMESYFRAGALQLLLVGDKVPHDLDMLLRATYFGSIVLLSPAVIDSPLKLELRVLAPPRCTIKPSGTTISVTASVTIALVPPDQPEVQLSSMTMDARLSAKMALRGKALRTQLDLRRFRIYSNHSALESLALIPLQAPLKTMLQIGVMPMLNERTWRGVQIPLPEGINFVHEVVTNHAGFLTIGADLHFAKGLREVIEKNRPADVRASTAPTPSTAAV

SEQ ID NO: 45 - protein, 480 aa, Homo sapiens
MARFPKADLAAAGVMLLCHFFTDQFQFADGKPGDQILDWQYGVTQAFPHTEEEVEVDSHAYSHRWKRNLDFLKAVDTNRASVGQDSPEPRSFTDLLLDDGQDNNTQIEEDTDHNYYISRIYGPSDSASRDLWVNIDQMEKDKVKIHGILSNTHRQAARVNLSFDFPFYGHFLREITVATGGFIYTGEVVHRMLTATQYIAPLMANFDPSVSRNSTVRYFDNGTALVVQWDHVHLQDNYNLGSFTFQATLLMDGRIIFGYKEIPVLVTQISSTNHPVKVGLSDAFVVVHRIQQIPNVRRRTIYEYHRVELQMSKITNISAVEMTPLPTCLQFNRCGPCVSSQIGFNCSWCSKLQRCSSGFDRHRQDWVDSGCPEESKEKMCENTEPVETSSRTTTTVGATTTQFRVLTTTRRAVTSQFPTSLPTEDDTKIALHLKDNGASTDDSAAEKKGGTLHAGLIIGILILVLIVATAILVTVYMYHH

SEQ ID NO: 46 - protein, 2677 aa, Homo sapiens
MSTCCWCTPGGASTIDFLKRYASNTPSGEFQTADEDLCYCLECVAEYHKARDELPFLHEVLWELETLRLINHFEKSMKAEIGDDDELYIVDNNGEMPLFDITGQDFENKLRVPLLEILKYPYLLLHERVNELCVEALCRMEQANCSFQVFDKHPGIYLFLVHPNEMVRRWAILTARNLGKVDRDDYYDLQEVLLCLFKVIELGLLESPDIYTSSVLEKGKLILLPSHMYDTTNYKSYWLGICMLLTILEEQAMDSLLLGSDKQNDFMQSILHTMEREADDDSVDPFWPALHCFMVILDRLGSKVWGQLMDPIVAFQTIINNASYNREIRHIRNSSVRTKLEPESYLDDMVTCSQIVYNYNPEKTKKDSGWRTAICPDYCPNMYEEMETLASVLQSDIGQDMRVHNSTFLWFIPFVQSLMDLKDLGVAYIAQVVNHLYSEVKEVLNQTDAVCDKVTEFFLLILVSVIELHRNKKCLHLLWVSSQQWVEAVVKCAKLPTTAFTRSSEKSSGNCSKGTAMISSLSLHSMPSNSVQLAYVQLIRSLLKEGYQLGQQSLCKRFWDKLNLFLRGNLSLGWQLTSQETHELQSCLKQIIRNIKFKAPPCNTFVDLTSACKISPASYNKEESEQMGKTSRKDMHCLEASSPTFSKEPMKVQDSVSIKADNTIEGDNNEQNYIKDVKLEDHLLAGSCLKQSSKNIFTERAEDQIKISTRKQKSVKEISSYTPKDCTSRNGPERGCDRGIIVSTRLLTDSSTDALEKVSTSNEDFSLKDDALAKTSKRKTKVQKDEICAKLSHVIKKQHRKSTLVDNTINLDENLTVSNIESFYSRKDTGVQKGDGFIHNLSLDPSGVLDDKNGEQKSQNNVLPKEKQLKNEELVIFSFHENNCKIQEFHVDGKELIPFTEMTNASEKKSSPFKDLMTVPESRDEEMSNSTSVIYSNLTREQAPDISPKSDTLTDSQIDRDLHKLSLLAQASVITFPSDSPQNSSQLQRKVKEDKRCFTANQNNVGDTSRGQVIIISDSDDDDDERILSLEKLTKQDKICLEREHPEQHVSTVNSKEEKNPVKEEKTETLFQFEESDSQCFEFESSSEVFSVWQDHPDDNNSVQDGEKKCLAPIANTTNGQGCTDYVSEVVKKGAEGIEEHTRPRSISVEEFCEIEVKKPKRKRSEKPMAEDPVRPSSSVRNEGQSDTNKRELVGNDFKSIDRRTSTPNSRIQRATTVSQKKSSKLCTCTEPIRKVPVSKTPKKTHSDAKKRQNRSSNYLSCRTTPAIVPPKKFRQCPEPTSTAEKLGLKKGPRKAYELSQRSLDYVAQLRDHGKTVGVVDTRKKTKLISPQNLSVRNNKKLLTSQELQMQRQIRPKSQKNRRRLSDCESTDVKRAGSHTAQNSDVFVPESDRSDYNCTGGTEVLANSNRKQLIKCMPSEPETIKAKHGSPATDDACPLNQCDSVVLNGTVPTNEVIVSTSEDPLGGGDPTARHIEMAALKEGEPDSSSDAEEDNLFLTQNDPEDMDLCSQMENDNYKLIELIHGKDTVEVEEDSVSRPQLESLSGTKCKYKDCLETTKNQGEYCPKHSEVKAADEDVFRKPGLPPPASKPLRPTTKIFSSKSTSRIAGLSKSLETSSALSPSLKNKSKGIQSILKVPQPVPLIAQKPVGEMKNSCNVLHPQSPNNSNRQGCKVPFGESKYFPSSSPVNILLSSQSVSDTFVKEVLKWKYEMFLNFGQCGPPASLCQSISRPVPVRFHNYGDYFNVFFPLMVLNTFETVAQEWLNSPNRENFYQLQVRKFPADYIKYWEFAVYLEECELAKQLYPKENDLVFLAPERINEEKKDTERNDIQDLHEYHSGYVHKFRRTSVMRNGKTECYLSIQTQENFPANLNELVNCIVISSLVTTQRKLKAMSLLGSRNQLARAVLNPNPMDFCTKDLLTTTSERIIAYLRDFNEDQKKAIETAYAMVKHSPSVAKICLIHGPPGTGKSKTIVGLLYRLLTENQRKGHSDENSNAKIKQNRVLVCAPSNAAVDELMKKIILEFKEKCKDKKNPLGNCGDINLVRLGPEKSINSEVLKFSLDSQVNHRMKKELPSHVQAMHKRKEFLDYQLDELSRQRALCRGGREIQRQELDENISKVSKERQELASKIKEVQGRPQKTQSIIILESHIICCTLSTSGGLLLESAFRGQGGVPFSCVIVDEAGQSCEIETLTPLIHRCNKLILVGDPKQLPPTVISMKAQEYGYDQSMMARFCRLLEENVEHNMISRLPILQLTVQYRMHPDICLFPSNYVYNRNLKTNRQTEAIRCSSDWPFQPYLVFDVGDGSERRDNDSYINVQEIKLVMEIIKLIKDKRKDVSFRNIGIITHYKAQKTMIQKDLDKEFDRKGPAEVDTVDAFQGRQKDCVIVTCVRANSIQGSIGFLASLQRLNVTITRAKYSLFILGHLRTLMENQHWNQLIQDAQKRGAIIKTCDKNYRHDAVKILKLKPVLQRSLTHPPTIAPEGSRPQGGLPSSKLDSGFAKTSVAASLYHTPSDSKEITLTVTSKDPERPPVHDQLQDPRLLKRMGIEVKGGIFLWDPQPSSPQHPGATPPTGEPGFPVVHQDLSHIQQPAAVVAALSSHKPPVRGEPPAASPEASTCQSKCDDPEEELCHRREARAFSEGEQEKCGSETHHTRRNSRWDKRTLEQEDSSSKKRKLL

SEQ ID NO: 47 - protein, 1404 aa, Homo sapiens
MAWKTLPIYLLLLLSVFVIQQVSSQDLSSCAGRCGEGYSRDATCNCDYNCQHYMECCPDFKRVCTAELSCKGRCFESFERGRECDCDAQCKKYDKCCPDYESFCAEVHNPTSPPSSKKAPPPSGASQTIKSTTKRSPKPPNKKKTKKVIESEEITEEHSVSENQESSSSSSSSSSSSTIRKIKSSKNSAANRELQKKLKVKDNKKNRTKKKPTPKPPVVDEAGSGLDNGDFKVTTPDTSTTQHNKVSTSPKITTAKPINPRPSLPPNSDTSKETSLTVNKETTVETKETTTTNKQTSTDGKEKTTSAKETQSIEKTSAKDLAPTSKVLAKPTPKAETTTKGPALTTPKEPTPTTPKEPASTTPKEPTPTTIKSAPTTPKEPAPTTTKSAPTTPKEPAPTTTKEPAPTTPKEPAPTTTKEPAPTTTKSAPTTPKEPAPTTPKKPAPTTPKEPAPTTPKEPTPTTPKEPAPTTKEPAPTTPKEPAPTAPKKPAPTTPKEPAPTTPKEPAPTTTKEPSPTTPKEPAPTTTKSAPTTTKEPAPTTTKSAPTTPKEPSPTTTKEPAPTTPKEPAPTTPKKPAPTTPKEPAPTTPKEPAPTTTKKPAPTTPKEPAPTTPKETAPTTPKKLTPTTPEKLAPTTPEKPAPTTPEELAPTTPEEPTPTTPEEPAPTTPKAAAPNTPKEPAPTTPKEPAPTTPKEPAPTTPKETAPTTPKGTAPTTLKEPAPTTPKKPAPKELAPTTTKEPTSTTCDKPAPTTPKGTAPTTPKEPAPTTPKEPAPTTPKGTAPTTLKEPAPTTPKKPAPKELAPTTTKGPTSTTSDKPAPTTPKETAPTTPKEPAPTTPKKPAPTTPETPPPTTSEVSTPTTTKEPTTIHKSPDESTPELSAEPTPKALENSPKEPGVPTTKTPAATKPEMTTTAKDKTTERDLRTTPETTTAAPKMTKETATTTEKTTESKITATTTQVTSTTTQDTTPFKITTLKTTTLAPKVTTTKKTITTTEIMNKPEETAKPKDRATNSKATTPKPQKPTKAPKKPTSTKKPKTMPRVRKPKTTPTPRKMTSTMPELNPTSRIAEAMLQTTTRPNQTPNSKLVEVNPKSEDAGGAEGETPHMLLRPHVFMPEVTPDMDYLPRVPNQGIIINPMLSDETNICNGKPVDGLTTLRNGTLVAFRGHYFWMLSPFSPPSPARRITEVWGIPSPIDTVFTRCNCEGKTFFFKDSQYWRFTNDIKDAGYPKPIFKGFGGLTGQIVAALSTAKYKNWPESVYFFKRGGSIQQYIYKQEPVQKCPGRRPALNYPVYGETTQVRRRRFERAIGPSQTHTIRIQYSPARLAYQDKGVLHNEVKVSILWRGLPNVVTSAISLPNIRKPDGYDYYAFSKDQYYNIDVPSRTARAITTRSGQTLSKVWYNCP

SEQ ID NO: 48 - protein, 427 aa, Homo sapiens
MHLIDYLLLLLVGLLALSHGQLHVEHDGESCSNSSHQQILETGEGSPSLKIAPANADFAFRFYYLIASETPGKNIFFSPLSISAAYAMLSLGACSHSRSQILEGLGFNLTELSESDVHRGFQHLLHTLNLPGHGLETRVGSALFLSHNLKFLAKFLNDTMAVYEAKLFHTNFYDTVGTIQLINDHVKKETRGKIVDLVSELKKDVLMVLVNYIYFKALWEKPFISSRTTPKDFYVDENTTVRVPMMLQDQEHHWYLHDRYLPCSVLRMDYKGDATVFFILPNQGKMREIEEVLTPEMLMRWNNLLRKRNFYKKLELHLPKFSISGSYVLDQILPRLGFTDLFSKWADLSGITKQQKLEASKSFHKATLDVDEAGTEAAAATSFAIKFFSAQTNRHILRFNRPFLVVIFSTSTQSVLFLGKVVDPTKP

SEQ ID NO: 49 - protein, 481 aa, Homo sapiens
MGALARALPSILLALLLTSTPEALGANPGLVARITDKGLQYAAQEGLLALQSELLRITLPDFTGDLRIPHVGRGRYEFHSLNIHSCELLHSALRPVPGQGLSLSISDSSIRVQGRWKVRKSFFKLQGSFDVSVKGISISVNLLLGSESSGRPTVTASSCSSDIADVEVDMSGDLGWLLNLFHNQIESKFQKVLESRICEMIQKSVSSDLQPYLQTLPVTTEIDSFADIDYSLVEAPRATAQMLEVMFKGEIFHRNHRSPVTLLAAVMSLPEEHNKMVYFAISDYVFNTASLVYHEEGYLNFSITDDMIPPDSNIRLTTKSFRPFVPRLARLYPNMNLELQGSVPSAPLLNFSPGNLSVDPYMEIDAFVLLPSSSKEPVFRLSVATNVSATLTFNTSKITGFLKPGKVKVELKESKVGLFNAELLEALLNYYILNTFYPKFNDKLAEGFPLPLLKRVQLYDLGLQIHKDFLFLGANVQYMRV

SEQ ID NO: 50 - protein, 166 aa, Homo sapiens
MAQTSSYFMLISCLMFLSQSQGQEAQTELPQARISCPEGTNAYRSYCYYFNEDRETWVDADLYCQNMNSGNLVSVLTQAEGAFVASLIKESGTDDFNVWIGLHDPKKNRRWHWSSGSLVSYKSWGIGAPSSVNPGYCVSLTSSTGFQKWKDVPCEDKFSFVCKFKN

SEQ ID NO: 51 - protein, 972 aa, Homo sapiens
MGPGVLLLLLVATAWHGQGIPVIEPSVPELVVKPGATVTLRCVGNGSVEWDGPPSPHWTLYSDGSSSILSTNNATFQNTGTYRCTEPGDPLGGSAAIHLYVKDPARPWNVLAQEVVVFEDQDALLPCLLTDPVLEAGVSLVRVRGRPLMRHTNYSFSPWHGFTIHRAKFIQSQDYQCSALMGGRKVMSISIRLKVQKVIPGPPALTLVPAELVRIRGEAAQIVCSASSVDVNFDVFLQHNNTKLAIPQQSDFHNNRYQKVLTLNLDQVDFQHAGNYSCVASNVQGKHSTSMFFRVVESAYLNLSSEQNLIQEVTVGEGLNLKVMVEAYPGLQGFNWTYLGPFSDHQPEPKLANATTKDTYRHTFTLSLPRLKPSEAGRYSFLARNPGGWRALTFELTLRYPPEVSVIWTFINGSGTLLCAASGYPQPNVTWLQCSGHTDRCDEAQVLQVWDDPYPEVLSQEPFHKVTVQSLLTVETLEHNQTYECRAHNSVGSGSWAFIPISAGAHTHPPDEFLFTPVVVACMSIMALLLLLLLLLLYKYKQKPKYQVRWKIIESYEGNSYTFIDPTQLPYNEKWEFPRNNLQFGKTLGAGAFGKVVEATAFGLGKEDAVLKVAVKMLKSTAHADEKEALMSELKIMSHLGQHENIVNLLGACTHGGPVLVITEYCCYGDLLNFLRRKAEAMLGPSLSPGQDPEGGVDYKNIHLEKKYVRRDSGFSSQGVDTYVEMRPVSTSSNDSFSEQDLDKEDGRPLELRDLLHFSSQVAQGMAFLASKNCIHRDVAARNVLLTNGHVAKIGDFGLARDIMNDSNYIVKGNARLPVKWMAPESIFDCVYTVQSDVWSYGILLWEIFSLGLNPYPGILVNSKFYKLVKDGYQMAQPAFAPKNIYSIMQACWALEPTHRPTFQQICSFLQEQAQEDRRERDYTNLPSSSRSGGSGSSSSELEEESSSEHLTCCEQGDIAQPLLQPNNYQFC

SEQ ID NO: 52 - protein, 298 aa, Homo sapiens
MKTLQSTLLLLLLVPLIKPAPPTQQDSRIIYDYGTDNFEESIFSQDYEDKYLDGKNIKEKETVIIPNEKSLQLQKDEAITPLPPKKENDEMPTCLLCVCLSGSVYCEEVDIDAVPPLPKESAYLYARFNKIKKLTAKDFADIPNLRRLDFTGNLIEDIEDGTFSKLSLLEELSLAENQLLKLPVLPPKLTLFNAKYNKIKSRGIKANAFKKLNNLTFLYLDHNALESVPLNLPESLRVIHLQFNNIASITDDTFCKANDTSYIRDRIEEIRLEGNPIVLGKHPNSFICLKRLPIGSYF

SEQ ID NO: 53 - protein, 298 aa, Homo sapiens; identical to SEQ ID NO: 52

SEQ ID NO: 54 - protein, 5205 aa, Homo sapiens
MGAPSACRTLVLALAAMLVVPQAETQGPVEPSWENAGHTMDGGAPTSSPTRRVSFVPPVTVFPSLSPLNPAHNGRVCSTWGDFHYKTFDGDVFRFPGLCNYVFSEHCRAAYEDFNVQLRRGLVGSRPVVTRVVIKAQGLVLEASNGSVLINGQREELPYSRTGLLVEQSGDYIKVSIRLVLTFLWNGEDSALLELDPKYANQTCGLCGDFNGLPAFNEFYAHNARLTPLQFGNLQKLDGPTEQCPDPLPLPAGNCTDEEGICHRTLLGPAFAECHALVDSTAYLAACAQDLCRCPTCPCATFVEYSRQCAHAGGQPRNWRCPELCPRTCPLNMQHQECGSPCTDTCSNPQRAQLCEDHCVDGCFCPPGTVLDDITHSGCLPLGQCPCTHGGRTYSPGTSFNTTCSSCTCSGGLWQCQDLPCPGTCSVQGGAHISTYDEKLYDLHGDCSYVLSKKCADSSFTVLAELRKCGLTDNENCLKAVTLSLDGGDTAIRVQADGGVFLNSIYTQLPLSAANITLFTPSSFFIVVQTGLGLQLLVQLVPLMQVFVRLDPAHQGQMCGLCGNFNQNQADDFTALSGVVEATGAAFANTWKAQAACANARNSFEDPCSLSVENENYARHWCSRLTDPNSAFSRCHSIINPKPFHSNCMFDTCNCERSEDCLCAALSSYVHACAAKGVQLSDWRDGVCTKYMQNCPKSQRYAYVVDACQPTCRGLSEADVTCSVSFVPVDGCTCPAGTFLNDAGACVPAQECPCYAHGTVLAPGEVVHDEGAVCSCTGGKLSCLGASLQKSTGCAAPMVYLDCSNSSAGTPGAECLRSCHTLDVGCFSTHCVSGCVCPPGLVSDGSGGCIAEEDCPCVHNEATYKPGETIRVDCNTCTCRNRRWECSHRLCLGTCVAYGDGHFITFDGDRYSFEGSCEYILAQDYCGDNTTHGTFRIVTENIPCGTTGTTCSKAIKLFVESYELILQEGTFKAVARGPGGDPPYKIRYMGIFLVIETHGMAVSWDRKTSVFIRLHQDYKGRVCGLCGNFDDNAINDFATRSRSVVGDALEFGNSWKLSPSCPDALAPKDPCTANPFRKSWAQKQCSILHGPTFAACRSQVDSTKYYEACVNDACACDSGGDCECFCTAVAAYAQACHDAGLCVSWRTPDTCPLFCDFYNPHGGCEWHYQPCGAPCLKTCRNPSGHCLVDLPGLEGCYPKCPPSQPFFNEDQMKCVAQCGCYDKDGNYYDVGARVPTAENCQSCNCTPSGIQCAHSLEACTCTYEDRTYSYQDVIYNTTDGLGACLIAICGSNGTIIRKAVACPGTPATTPFTFTTAWVPHSTTSPALPVSTVCVREVCRWSSWYNGHRPEPGLGGGDFETFENLRQRGYQVCPVLADIECRAAQLPDMPLEELGQQVDCDRMRGLMCANSQQSPPLCHDYELRVLCCEYVPCGPSPAPGTSPQPSLSASTEPAVPTPTQTTATEKTTLWVTPSIRSTAALTSQTGSSSGPVTVTPSAPGTTTCQPRCQWTEWFDEDYPKSEQLGGDVESYDKIRAAGGHLCQQPKDIECQAESFPNWTLAQVGQKVHCDVHFGLVCRNWEQEGVFKMCYNYRIRVLCCSDDHCRGRATTPPPTTELETATTTTTQALFSTPQPTSSPGLTRAPPASTTAVPTLSEGLTSPRYTSTLGTATTGGPTTPAGSTEPTVPGVATSTLPTRSALPGTTGSLGTWRPSQPPTLAPTTMATSRARPTGTASTASKEPLTTSLAPTLTSELSTSQAETSTPRTETTMSPLTNTTTSQGTTRCQPKCEWTEWFDVDFPTSGVAGGDMETFENIRAAGGKMCWAPKSIECRAENYPEVSIDQVGQVLTCSLETGLTCKNEDQTGRFNMCFNYNVRVLCCDDYSHCPSTPATSSTATPSSTPGTTWILTKPTTTATTTASTGSTATPTSTLRTAPPPKVLTTTATTPTVTSSKATPSSSPGTATALPALRSTATTPTATSVTPIPSSSLGTTWTRLSQTTTPTATMSTATPSSTPETAHTSTVLTTTATTTGATGSVATPSSTPGTAHTTKVLTTTTTGFTATPSSSPGRARTLPVWISTTTTPTTRGSTVTPSSIPGTTHTPTVLTTTTTTVATGSMATPSSSTQTSGTPPSLTTTATTITATGSTTNPSSTPGTTPIPPVLTTTATTPAATSSTVTPSSALGTTHTPPVPNTTATTHGRSLSPSSPHTVRTAWTSATSGTLGTTHITEPSTGTSHTPAATTGTTQHSTPALSSPHPSSRTTESPPSPGTTTPGHTRATSRTTATATPSKTRTSTLLPSSPTSAPITTVVTMGCEPQCAWSEWLDYSYPMPGPSGGDFDTYSNIRAAGGAVCEQPLGLECRAQAQPGVPLRELGQVVECSLDFGLVCRNREQVGKFKMCFNYEIRVFCCNYGHCPSTPATSSTATPSSTPGTTWILTEQTTAATTTATTGSTAIPSSTPGTAPPPKVLTSTATTPTATSSKATSSSSPRTATTLPVLTSTATKSTATSFTPIPSFTLGTTGTLPEQTTTPMATMSTIHPSSTPETTHTSTVLTTKATTTRATSSMSTPSSTPGTTWILTELTTAATTTAATGPTATPSSTPGTTWILTEPSTTATVTVPTGSTATASSTRATAGTLKVLTSTATTPTVISSRATPSSSPGTATALPALRSTATTPTATSVTAIPSSSLGTAWTRLSQTTTPTATMSTATPSSTPETVHTSTVLTTTTTTTRATGSVATPSSTPGTAHTTKVPTTTTTGFTATPSSSPGTALTPPVWISTTTTPTTRGSTVTPSSIPGTTHTATVLTTTTTTVATGSMATPSSSTQTSGTPPSLTTTATTITATGSTTNPSSTPGTTPIPPVLTTTATTPAATSSTVTPSSALGTTHTPPVPNTMATTHGRSLPPSSPHTVRTAWTSATSGILGTTHITEPSTVTSHTPAATTGTTQHSTPALSSPHPSSRTTESPPSPGTTTPGHTRGTSRTTATATPSKTRTSTLLPSSPTSAPITTVVTMGCEPQCAWSEWLDYSYPMPGPSGGDFDTYSNIRAAGGAVCEQPLGLECRAQAQPGVPLRELGQVVECSLDFGLVCRNREQVGKFKMCFNYEIRVFCCNYGHCPSTPATSSTAMPSSTPGTTWILTELTTTATTTESTGSTATPSSTPGTTWILTEPSTTATVTVPTGSTATASSTQATAGTPHVSTTATTPTVTSSKATPFSSPGTATALPALRSTATTPTATSFTAIPSSSLGTTWTRLSQTTTPTATMSTATPSSTPETAHTSTVLTTTATTTRATGSVATPSSTPGTAHTTKVPTTTTTGFTVTPSSSPGTARTPPVWISTTTTPTTSGSTVTPSSVPGTTHTPTVLTTTTTTVATGSMATPSSSTQTSGTPPSLITTATTITATGSTTNPSSTPGTTPIPPVLTTTATTPAATSSTVTPSSALGTTHTPPVPNTTATTHGRSLSPSSPHTVRTAWTSATSGTLGTTHITEPSTGTSHTPAATTGTTQHSTPALSSPHPSSRTTESPPSPGTTTPGHTRATSRTTATATPSKTRTSTLLPSSPTSAPITTVVTMGCEPQCAWSEWLDYSYPMPGPSGGDFDTYSNIRAAGGAVCEQPLGLECRAQAQPGVPLGELGQVVECSLDFGLVCRNREQVGKFKMCFNYEIRVFCCNYGHCPSTPATSSTAMPSSTPGTTWILTELTTTATTTASTGSTATPSSTPGTAPPPKVLTSPATTPTATSSKATSSSSPRTATTLPVLTSTATKSTATSVTPIPSSTLGTTGTLPEQTTTPVATMSTIHPSSTPETTHTSTVLTTKATTTRATSSTSTPSSTPGTTWILTELTTAATTTAATGPTATPSSTPGTTWILTELTTTATTTASTGSTATPSSTPGTTWILTEPSTTATVTVPTGSTATASSTQATAGTPHVSTTATTPTVTSSKATPSSSPGTATALPALRSTATTPTATSFTAIPSSSLGTTWTRLSQTTTPTATMSTATPSSTPETVHTSTVLTATATTTGATGSVATPSSTPGTAHTTKVPTTTTTGFTATPSSSPGTALTPPVWISTTTTPTTTTPTTSGSTVTPSSIPGTTHTARVLTTTTTTVATGSMATPSSSTQTSGTPPSLTTTATTITATGSTTNPSSTPGTTPITPVLTSTATTPAATSSKATSSSSPRTATTLPVLTSTATKSTATSFTPIPSSTLWTTWTVPAQTTTPMSTMSTIHTSSTPETTHTSTVLTTTATMTRATNSTATPSSTLGTTRILTELTTTATTTAATGSTATLSSTPGTTWILTEPSTIATVMVPTGSTATASSTLGTAHTPKVVTTMATMPTATASTVPSSSTVGTTRTPAVLPSSLPTFSVSTVSSSVLTTLRPTGFPSSHFSTPCFCRAFGQFFSPGEVIYNKTDRAGCHFYAVCNQHCDIDRFQGACPTSPPPVSSAPLSSPSPAPGCDNAIPLRQVNETWTLENCTVARCVGDNRVVLLDPKPVANVTCVNKHLPIKVSDPSQPCDFHYECECICSMWGGSHYSTFDGTSYTFRGNCTYVLMREIHARFGNLSLYLDNHYCTASATAAAARCPRALSIHYKSMDIVLTVTMVHGKEEGLILFDQIPVSSGFSKNGVLVSVLGTTTMRVDIPALGVSVTFNGQVFQARLPYSLFHNNTEGQCGTCTNNQRDDCLQRDGTTAASCKDMAKTWLVPDSRKDGCWAPTGTPPTASPAAPVSSTPTPTPCPPQPLCDLMLSQVFAECHNLVPPGPFFNACISDHCRGRLEVPCQSLEAYAELCRARGVCSDWRGATGGLCDLTCPPTKVYKPCGPIQPATCNSRNQSPQLEGMAEGCFCPEDQILFNAHMGICVQACPCVGPDGFPKFPGERWVSNCQSCVCDEGSVSVQCKPLPCDAQGQPPPCNRPGFVTVTRPRAENPCCPETVCVCNTTTCPQSLPVCPPGQESICTQEEGDCCPTFRCRPQLCSYNGTFYGVGATFPGALPCHMCTCLSGDTQDPTVQCQEDACNNTTCPQGFEYKRVAGQCCGECVQTACLTPDGQPVQLNETWVNSHVDNCTVYLCEAEGGVHLLTPQPASCPDVSSCRGSLRKTGCCYSCEEDSCQVRINTTILWHQGCETEVNITFCEGSCPGASKYSAEAQAMQHQCTCCQERRVHEETVPLHCPNGSAILHTYTHVDECGCTPFCVPAPMAPPHTRGFPAQEATAV

SEQ ID NO: 55 - protein, 949 aa, Homo sapiens
MILSLLFSLGGPLGWGLLGAWAQASSTSLSDLQSSRTPGVWKAEAEDTSKDPVGRNWCPYPMSKLVTLLALCKTEKFLIHSQQPCPQGAPDCQKVKVMYRMAHKPVYQVKQKVLTSLAWRCCPGYTGPNCEHHDSMAIPEPADPGDSHQEPQDGPVSFKPGHLAAVINEVEVQQEQQEHLLGDLQNDVHRVADSLPGLWKALPGNLTAAVMEANQTGHEFPDRSLEQVLLPHVDTFLQVHFSPIWRSFNQSLHSLTQAIRNLSLDVEANRQAISRVQDSAVARADFQELGAKFEAKVQENTQRVGQLRQDVEDRLHAQHFTLHRSISELQADVDTKLKRLHKAQEAPGTNGSLVLATPGAGARPEPDSLQARLGQLQRNLSELHMTTARREEELQYTLEDMRATLTRHVDEIKELYSESDETFDQISKVERQVEELQVNHTALRELRVILMEKSLIMEENKEEVERQLLELNLTLQHLQGGHADLIKYVKDCNCQKLYLDLDVIREGQRDATRALEETQVSLDERRQLDGSSLQALQNAVDAVSLAVDAHKAEGERARAATSRLRSQVQALDDEVGALKAAAAEARHEVRQLHSAFAALLEDALRHEAVLAALFGEEVLEEMSEQTPGPLPLSYEQIRVALQDAASGLQEQALGWDELAARVTALEQASEPPRPAEHLEPSHDAGREEAATTALAGLARELQSLSNDVKNVGRCCEAEAGAGAASLNASLDGLHNALFATQRSLEQHQRLFHSLFGNFQGLMEANVSLDLGKLQTMLSRKGKKQQKDLEAPRKRDKKEAEPLVDIRVTGPVPGALGAALWEAGSPVAFYASFSEGTAALQTVKFNTTYINIGSSYFPEHGYFRAPERGVYLFAVSVEFGPGPGTGQLVFGGHHRTPVCTTGQGSGSTATVFAMAELQKGERVWFELTQGSITKRSLSGTAFGGFLMFKT

SEQ ID NO: 56 - protein, 504 aa, Homo sapiens
MRFFCARCCSFGPEMPAVQLLLLACLVWDVGARTAQLRKANDQSGRCQYTFSVASPNESSCPEQSQAMSVIHNLQRDSSTQRLDLEATKARLSSLESLLHQLTLDQAARPQETQEGLQRELGTLRRERDQLETQTRELETAYSNLLRDKSVLEEEKKRLRQENENLARRLESSSQEVARLRRGQCPQTRDTARAVPPGSREVSTWNLDTLAFQELKSELTEVPASRILKESPSGYLRSGEGDTGCGELVWVGEPLTLRTAETITGKYGVWMRDPKPTYPYTQETTWRIDTVGTDVRQVFEYDLISQFMQGYPSKVHILPRPLESTGAVVYSGSLYFQGAESRTVIRYELNTETVKAEKEIPGAGYHGQFPYSWGGYTDIDLAVDEAGLWVIYSTDEAKGAIVLSKLNPENLELEQTWETNIRKQSVANAFIICGTLYTVSSYTSADATVNFAYDTGTGISKTLTIPFKNRYKYSSMIDYNPLEKKLFAWDNLNMVTYDIKLSKM

SEQ ID NO: 57 - protein, 153 aa, Homo sapiens
GLSDGEWQLVLNVWGKVEADIPGHGQEVLIRLFKGHPETLEKFDKFKHLKSEDEMKASEDLKKHGATVLTALGGILKKKGHHEAEIKPLAQSHATKHKIPVKYLEFISECIIQVLQSKHPGDFGADAQGAMNKALELFRKDMASNYKELGFQG

SEQ ID NO: 58 - protein, 1392 aa, Homo sapiens
MSSTLHSVFFTLKVSILLGSLLGLCLGLEFMGLPNQWARYLRWDASTRSDLSFQFKTNVSTGLLLYLDDGGVCDFLCLSLVDGRVQLRFSMDCAETAVLSNKQVNDSSWHFLMVSRDRLRTVLMLDGEGQSGELQPQRPYMDVVSDLFLGGVPTDIRPSALTLDGVQAMPGFKGLILDLKYGNSEPRLLGSRGVQMDAEGPCGERPCENGGICFLLDGHPTCDCSTTGYGGKLCSEGLSHLMMSEQGRSKAREENVATFRGSEYLCYDLSQNPIQSSSDEITLSFKTWQRNGLILHTGKSADYVNLALKDGAVSLVINLGSGAFEAIVEPVNGKFNDNAWHDVKVTRNLRQVTISVDGILTTTGYTQEDYTMLGSDDFFYVGGSPSTADLPGSPVSNNFMGCLKEVVYKNNDIRLELSRLARIADTKMKIYGEVVFKCENVATLDPINFETPEAYISLPKWNTKRMGSISFDFRTTEPNGLILFTHGKPQERKDARSQKNTKVDFFAVELLDGNLYLLLDMGSGTIKVKATQKKANDGEWYHVDIQRDGRSGTISVNSRRTPFTASGESEILDLEGDMYLGGLPENRAGLILPTELWTAMLNYGYVGCIRDLFIDGRSKNIRQLAEMQNAAGVKSSCSRMSAKQCDSYPCKNNAVCKDGWNRFICDCTGTGYWGRTCEREASILSYDGSMYMKIIMPMVMHTEAEDVSFRFMSQRAYGLLVATTSRDSADTLRLELDGGRVKLMVNLGKGPETLYAGQKLNDNEWHTVRVVRRGKSLKLTVDDDVAEGTMVGDHTRLEFHNIETGIMTEKRYISVVPSSFIGHLQSLMFNGLLYIDLCKNGDIDYCELKARFGLRNIIADPVTFKTKSSYLSLATLQAYTSMHLFFQFKTTSPDGFILFNSGDGNDFIAVELVKGYIHYVFDLGNGPNVIKGNSDRPLNDNQWHNVVITRDNSNTHSLKVDTKVVTQVINGAKNLDLKGDLYMAGLAQGMYSNLPKLVASRDGFQGCLASVDLNGRLPDLINDALHRSGQIERGCEGPSTTCQEDSCANQGVCMQQWEGFTCDCSMTSYSGNQCNDPGATYIFGKSGGLILYTWPANDRPSTRSDRLAVGFSTTVKDGILVRIDSAPGLGDFLQLHIEQGKIGVVFNIGTVDISIKEERTPVNDGKYHVVRFTRNGGNATLQVDNWPVNEHYPTGNTDNERFQMVKQKIPFKYNRPVEEWLQEKGRQLTIFNTQAQIAIGGKDKGRLFQGQLSGLYYDGLKVLNMAAENNPNIKINGSVRLVGEVPSILGTTQTTSMPPEMSTTVMETTTTMATTTTRKNRSTASIQPTSDDLVSSAECSSDDEDFVECEPSTGRSARSSNAARSLRAALTWTWRLTYTFTPIIFISCVVHS

SEQ ID NO: 59 - protein, 1375 aa, Homo sapiens
MEGDRVAGRPVLSSLPVLLLLQLLMLRAAALHPDELFPHGESWGDQLLQEGDDESSAVVKLANPLHFYEARFSNLYVGTNGIISTQDFPRETQYVDYDFPTDFPAIAPFLADIDTSHGRGRVLYREDTSPAVLGLAARYVRAGFPRSARFTPTHAFLATWEQVGAYEEVKRGALPSGELNTFQAVLASDGSDSYALFLYPANGLQFLGTRPKESYNVQLQLPARVGFCRGEADDLKSEGPYFSLTSTEQSVKNLYQLSNLGIPGVWAFHIGSTSPLDNVRPAAVGDLSAAHSSVPLGRSFSHATALESDYNEDNLDYYDVNEEEAEYLPGEPEEALNGHSSIDVSFQSKVDTKPLEESSTLDPHTKEGTSLGEVGGPDLKGQVEPWDERETRSPAPPEVDRDSLAPSWETPPPYPENGSIQPYPDGGPVPSEMDVPPAHPEEEIVLRSYPASDHTTPLSRGTYEVGLEDNIGSNTEVFTYNAANKETCEHNHRQCSRHAFCTDYATGFCCHCQSKFYGNGKHCLPEGAPHRVNGKVSGHLHVGHTPVHFTDVDLHAYIVGNDGRAYTAISHIPQPAAQALLPLTPIGGLFGWLFALEKPGSENGFSLAGAAFTHDMEVTFYPGEETVRITQTAEGLDPENYLSIKTNIQGQVPYVPANFTAHISPYKELYHYSDSTVTSTSSRDYSLTFGAINQTWSYRIHQNITYQVCRHAPRHPSFPTTQQLNVDRVFALYNDEERVLRFAVTNQIGPVKEDSDPTPVNPCYDGSHMCDTTARCHPGTGVDYTCECASGYQGDGRNCVDENECATGFHRCGPNSVCINLPGSYRCECRSGYEFADDRHTCILITPPANPCEDGSHTCAPAGQARCVHHGGSTFSCACLPGYAGDGHQCTDVDECSENRCHPAATCYNTPGSFSCRCQPGYYGDGFQCIPDSTSSLTPCEQQQRHAQAQYAYPGARFHIPQCDEQGNFLPLQCHGSTGFCWCVDPDGHEVPGTQTPPGSTPPHCGPSPEPTQRPPTICERWRENLLEHYGGTPRDDQYVPQCDDLGHFIPLQCHGKSDFCWCVDKDGREVQGTRSQPGTTPACIPTVAPPMVRPTPRPDVTPPSVGTFLLYTQGQQIGYLPLNGTRLQKDAAKTLLSLHGSIIVGIDYDCRERMVYWTDVAGRTISRAGLELGAEPETIVNSGLISPEGLAIDHIRRTMYWTDSVLDKIESALLDGSERKVLFYTDLVNPRAIAVDPIRGNLYWTDWNREAPKIETSSLDGENRRILINTDIGLPNGLTFDPFSKLLCWADAGTKKLECTLPDGTGRRVIQNNLKYPFSIVSYADHFYHTDWRRDGVVSVNKHSGQFTDEYLPEQRSHLYGITAVYPYCPTGRK

SEQ ID NO: 60 - protein, 212 aa, Homo sapiens
MGPGPRLLLPLVLCVGLGALVFSSGAEGFRKRGPSVTAKVFFDVRIGDKDVGRIVIGLFGKVVPKTVENFVALATGEKGYGYKGSKFHRVIKDFMIQGGDITTGDGTGGVSIYGETFPDENFKLKHYGIGWVSMANAGPDTNGSQFFITLTKPTWLDGKHVVFGKVIDGMTVVHSIELQATDGHDRPLTNCSIINSGKIDVKTPFVVEIADW

SEQ ID NO: 61 - protein, 186 aa, Homo sapiens
PVDLSKWSGPLSLQEVDEQPQHPLHVTYAGAAVDELGKVLTPTQVKNRPTSISWDGLDSGKLYTLVLTDPDAPSRKDPKYREWHHFLVVNMKGNDISSGTVLSDYVGSGPPKGTGLHRYVWLVYEQDRPLKCDEPILSNRSGDHRGKFKVASFRKKYELRAPVAGTCYQAEWDDYVPKLYEQLSGK

SEQ ID NO: 62 - protein, 1482 aa, Homo sapiens
MRKDRLLHLCLVLLLILLSASDSNSTEPQYMVLVPSLLHTEAPKKGCVLLSHLNETVTVSASLESGRENRSLFTDLVAEKDLFHCVSFTLPRISASSEVAFLSIQIKGPTQDFRKRNTVLVLNTQSLVFVQTDKPMYKPGQTVRFRVVSVDENFRPRNELIPLIYLENPRRNRIAQWQSLKLEAGINQLSFPLSSEPIQGSYRVVVQTESGGRIQHPFTVEEFVLPKFEVKVQVPKIISIMDEKVNITVCGEYTYGKPVPGLATVSLCRKLSRVLNCDKQEVCEEFSQQLNSNGCITQQVHTKMLQITNTGFEMKLRVEARIREEGTDLEVTANRISEITNIVSKLKFVKVDSHFRQGIPFFAQVLLVDGKGVPIPNKLFFISVNDANYYSNATTNEQGLAQFSINTTSISVNKLFVRVFTVHPNLCFHYSWVAEDHQGAQHTANRVFSLSGSYIHLEPVAGTLPCGHTETITAHYTLNRQAMGELSELSFHYLIMAKGVIVRSGTHTLPVESGDMKGSFALSFPVESDVAPIARMFIFAILPDGEVVGDSEKFEIENCLANKVDLSFSPAQSPPASHAHLQVAAAPQSLCALRAVDQSVLLMKPEAELSVSSVYNLLTVKDLTNFPDNVDQQEEEQGHCPRPFFIHNGAIYVPLSSNEADIYSFLKGMGLKVFTNSKIRKPKSCSVIPSVSAGAVGQGYYGAGLGVVERPYVPQLGTYNVIPLNNEQSSGPVPETVRSYFPETWIWELVAVNSSGVAEVGVTVPDTITEWKAGAFCLSEDAGLGISSTASLRAFQPFFVELTMPYSVIRGEVFTLKATVLNYLPKCIRVSVQLKASPAFLASQNTKGEESYCICGSERQTLSWTVTPKTLGNVNFSVSAEAMQSLELCGNEVVEVPEIKRKDTVIKTLLVEAEGIEQEKTFSSMTCASGANVSEQLSLKLPSNVVKESARASFSVLGDILGSAMQNIQNLLQMPYGCGEQNMVLFAPNIYVLNYLNETQQLTQEIKAKAVGYLITGYQRQLNYKHQDGSYSTFGERYGRNQGNTWLTAFVLKTFAQARSYIFIDEAHITQSLTWLSQMQKDNGCFRSSGSLLNNAIKGGVEDEATLSAYVTIALLEIPLPVTNPIVRNALFCLESAWNVAKEGTHGSHVYTKALLAYAFSLLGKQNQNREILNSLDKEAVKEDNLVHWERPQRPKAPVGHLYQTQAPSAEVEMTSYVLLAYLTAQPAPTSGDLTSATNIVKWIMKQQNAQGGFSSTQDTVVALHALSRYGAATFTRTEKTAQVTVQDSQTFSTNFQVDNNNLLLLQQISLPELPGEYVITVTGERCVYLQTSMKYNILPEKEDSPFALKVQTVPQTCDGHKAHTSFQISLTISYTGNRPASNMVIVDVKMVSGFIPLKPTVKMLERSSSVSRTEVSNNHVLIYVEQVTNQTLSFSFMVLQDIPVGDLKPAIVKVYDYYETDESVVAEYIAPCSTDTEHGNV

SEQ ID NO: 63 - protein, 189 aa, Homo sapiens
MASKRALVILAKGAEEMETVIPVDVMRRAGIKVTVAGLAGKDPVQCSRDVVICPDASLEDAKKEGPYDVVVLPGGNLGAQNLSESAAVKEILKEQENRKGLIAAICAGPTALLAHEIGFGSKVTTHPLAKDKMMNGGHYTYSENRVEKDGLILTSRGPGTSFEFALAIVEALNGKEVAAQVKAPLVLKD

SEQ ID NO: 64 - protein, 185 aa, Homo sapiens
LVAAMTTASTSQVRQNYHQDSEAAINGQINLELYASYVYLSVSYNFDRDDVALRNFATYFLHQSHEEREHAEKLMKLQNYRGGQIFLQDIKKPVCDDWESGLNAMECASHLEKNVNQSLLELHKLATDKNDPHLCDFIETCYLNEQVKAIKELGDHVTNLHKMGAPESGLAEYIFNKNTLGDSDN

SEQ ID NO: 65 - protein, 200 aa, Homo sapiens
TEKAPEPHVEEDDDDELDSKLNYKPPPQKSLKELQEMDKDDESLIKYKKTLLGDGPVVTDPKAPNVVVTRLTLVCESAPGPITMDLTGDLEALKKETIVLKEGSEYRVKIHFKVNRDIVSGLKYVQHTYRTGVKVDKATFMVGSYGPRPEEYEFLTPVEEAPKGMLARGTYHNKSFFTDDDKQDHLSWEWNLSIKKEWTE

SEQ ID NO: 66 - protein, 390 aa, Homo sapiens
MNSLSEANTKFMFDLFQQFRKSKENNIFYSPISITSALGMVLLGAKDNTAQQISKVLHFDQVTENTTEKAATYHVDRSGNVHHQFQKLLTEFNKSTDAYELKIANKLFGEKTYQFLQEYLDAIKKFYQTSVESTDFANAPEESRKKINSWVESQTNEKIKNLFPDGTIGNDTTLVLVNAIYFKGQWENKFKKENTKEEKFWPNKNTYKSVQMMRQYNSFNFALLEDVQAKVLEIPYKGKDLSMIVLLPNEIDGLQKLEEKLTAEKLMEWTSLQNMRETCVDLHLPRFKMEESYDLKDTLRTMGMVNIFNGDADLSGMTWSHGLSVSKVLHKAFVEVTEEGVEAAAATAVVVVELSSPSTNEEFCCNHPFLFFIRQNKTNSILFYGRFSSP

SEQ ID NO: 67 - protein, 222 aa, Homo sapiens [sequence omitted]

SEQ ID NO: 68 - protein, 104 aa, Homo sapiens
VKQIESKTAFQEALDAAGDKLVVVDFSATWCGPCKMIKPFFHSLSEKYSNVIFLEVDVDDCQDVASECEVKCMPTFQFFKKGQKVGEFSGANKEKLEATINELV

SEQ ID NO: 69 - protein, 415 aa, Homo sapiens
MSPFLYLVLLVLGLHATIHCASPEGKVTACHSSQPNATLYKMSSINADFAFNLYRRFTVETPDKNIFFSPVSISAALVMLSFGACCSTQTEIVETLGFNLTDTPMVEIQHGFQHLICSLNFPKKELELQIGNALFIGKHLKPLAKFLNDVKTLYETEVFSTDFSNISAAKQEINSHVEMQTKGKVVGLIQDLKPNTIMVLVNYIHFKAQWANPFDPSKTEDSSSFLIDKTTTVQVPMMHQMEQYYHLVDMELNCTVLQMDYSKNALALFVLPKEGQMESVEAAMSSKTLKKWNRLLQKGWVDLFVPKFSISATYDLGATLLKMGIQHAYSENADFSGLTEDNGLKLSNAAHKAVLHIGEKGTEAAAVPEVELSDQPENTFLHPIIQIDRSFMLLILERSTRSILFLGKVVNPTEA

SEQ ID NO: 70 - protein, 286 aa, Homo sapiens
MAEDGEEAEFHFAALYISGQWPRLRADTDLQRLGSSAMAPSRKFFVGGNWKMNGRKQSLGELIGTLNAAKVPADTEVVCAPPTAYIDFARQKLDPKIAVAAQNCYKVTNGAFTGEISPGMIKDCGATWVVLGHSERRHVFGESDELIGQKVAHALAEGLGVIACIGEKLDEREAGITEKVVFEQTKVIADNVKDWSKVVLAYEPVWAIGTGKTATPQQAQEVHEKLRGWLKSNVSDAVAQSTRIIYGGSVTGATCKELASQPDVDGFLVGGASLKPEFVDIINAKQ

SEQ ID NO: 71 - protein, 188 aa, Homo sapiens
MANSGCKDVTGPDEESFLYFAYGSNLLTERIHLRNPSAAFFCVARLQDFKLDFGNSQGKTSQTWHGGIATIFQSPGDEVWGVVWKMNKSNLNSLDEQEGVKSGMYVVIEVKVATQEGKEITCRSYLMTNYESAPPSPQYKKIICMGAKENGLPLEYQEKLKAIEPNDYTGKVSEEIEDIIKKGETQTL

SEQ ID NO: 72 - protein, 168 aa, Homo sapiens
MAGFPLLLTLLTHCAGSWAQSVLTQPPSASGTPGQRVTISCSGSSSNIGSNYVYWYQQLPGTAPKLLIYSNNQRPSGVPDRFSGSKSGTSASLAISGLRSEDEADYYCAAWDDSLSGPTVLQAQGELRQEPPSSSVRRVSPGSCCSGPACGFCCCSFPHGSKGIQGPA

SEQ ID NO: 73 - protein, 99 aa, Homo sapiens
QSALTQPPSVSGSPGQSVTISCTGTSSDVGSYNRVSWYQQPPGTAPKLMIYEVSNRPSGVPDRFSGSKSGNTASLTISGLQAEDEADYYCSLYTSSSTF

SEQ ID NO: 74 - protein, 2813 aa, Homo sapiens
MIPARFAGVLLALALILPGTLCAEGTRGRSSTARCSLFGSDFVNTFDGSMYSFAGYCSYLLAGGCQKRSFSIIGDFQNGKRVSLSVYLGEFFDIHLFVNGTVTQGDQRVSMPYASKGLYLETEAGYYKLSGEAYGFVARIDGSGNFQVLLSDRYFNKTCGLCGNFNIFAEDDFMTQEGTLTSDPYDFANSWALSSGEQWCERASPPSSSCNISSGEMQKGLWEQCQLLKSTSVFARCHPLVDPEPFVALCEKTLCECAGGLECACPALLEYARTCAQEGMVLYGWTDHSACSPVCPAGMEYRQCVSPCARTCQSLHINEMCQERCVDGCSCPEGQLLDEGLCVESTECPCVHSGKRYPPGTSLSRDCNTCICRNSQWICSNEECPGECLVTGQSHFKSFDNRYFTFSGICQYLLARDCQDHSFSIVIETVQCADDRDAVCTRSVTVRLPGLHNSLVKLKHGAGVAMDGQDIQLPLLKGDLRIQHTVTASVRLSYGEDLQMDWDGRGRLLVKLSPVYAGKTCGLCGNYNGNQGDDFLTPSGLAEPRVEDFGNAWKLHGDCQDLQKQHSDPCALNPRMTRFSEEACAVLTSPTFEACHRAVSPLPYLRNCRYDVCSCSDGRECLCGALASYAAACAGRGVRVAWREPGRCELNCPKGQVYLQCGTPCNLTCRSLSYPDEECNEACLEGCFCPPGLYMDERGDCVPKAQCPCYYDGEIFQPEDIFSDHHTMCYCEDGFMHCTMSGVPGSLLPDAVLSSPLSHRSKRSLSCRPPMVKLVCPADNLRAEGLECTKTCQNYDLECMSMGCVSGCLCPPGMVRHENRCVALERCPCFHQGKEYAPGETVKIGCNTCVCRDRKWNCTDHVCDATCSTIGMAHYLTFDGLKYLFPGECQYVLVQDYCGSNPGTFRILVGNKGCSHPSVKCKKRVTILVEGGEIELFDGEVNVKRPMKDETHFEVVESGRYIILLLGKALSVVWDRHLSISVVLKQTYQEKVCGLCGNFDGIQNNDLTSSNLQVEEDPVDFGNSWKVSSQCADTRKVPLDSSPATCHNNIMKQTMVDSSCRILTSDVFQDCNKLVDPEPYLDVCIYDTCSCESIGDCACFCDTIAAYAHVCAQHGKVVTWRTATLCPQSCEERNLRENGYECEWRYNSCAPACQVTCQHPEPLACPVQCVEGCHAHCPPGKILDELLQTCVDPEDCPVCEVAGRRFASGKKVTLNPSDPEHCQICHCDVVNLTCEACQEPGGLVVPPTDAPVSPTTLYVEDISEPPLHDFYCSRLLDLVFLLDGSSRLSEAEFEVLKAFVVDMMERLRISQKWVRVAVVEYHDGSHAYIGLKDRKRPSELRRIASQVKYAGSQVASTSEVLKYTLFQIFSKIDRPEASRIALLLMASQEPQRMSRNFVRYVQGLKKKKVIVIPVGIGPHANLKQIRLIEKQAPENKAFVLSSVDELEQQRDEIVSYLCDLAPEAPPPTLPPHMAQVTVGPGLLGVSTLGPKRNSMVLDVAFVLEGSDKIGEADFNRSKEFMEEVIQRMDVGQDSIHVTVLQYSYMVTVEYPFSEAQSKGDILQRVREIRYQGGNRTNTGLALRYLSDHSFLVSQGDREQAPNLVYMVTGNPASDEIKRLPGDIQVVPIGVGPNANVQELERIGWPNAPILIQDFETLPREAPDLVLQRCCSGEGLQIPTLSPAPDCSQPLDVILLLDGSSSFPASYFDEMKSFAKAFISKANIGPRLTQVSVLQYGSITTIDVPWNVVPEKAHLLSLVDVMQREGGPSQIGDALGFAVRYLTSEMHGARPGASKAVVILVTDVSVDSVDAAADAARSNRVTVFPIGIGDRYDAAQLRILAGPAGDSNVVKLQRIEDLPTMVTLGNSFLHKLCSGFVRICMDEDGNEKRPGDVWTLPDQCHTVTCQPDGQTLLKSHRVNCDRGLRPSCPNSQSPVKVEETCGCRWTCPCVCTGSSTRHIVTFDGQNFKLTGSCSYVLFQNKEQDLEVILHNGACSPGARQGCMKSIEVKHSALSVELHSDMEVTVNGRLVSVPYVGGNMEVNVYGAIMHEVRFNHLGHIFTFTPQNNEFQLQLSPKTFASKTYGLCGICDENGANDFMLRDGTVTTDWKTLVQEWTVQRPGQTCQPILEEQCLVPDSSHCQVLLLPLFAECHKVLAPATFYAICQQDSCHQEQVCEVIASYAHLCRTNGVCVDWRTPDFCAMSCPPSLVYNHCEHGCPRHCDGNVSSCGDHPSEGCFCPPDKVMLEGSCVPEEACTQCIGEDGVQHQFLEAWVPDHQPCQICTCLSGRKVNCTTQPCPTAKAPTCGLCEVARLRQNADQCCPEYECVCDPVSCDLPPVPHCERGLQPTLTNPGECRPNFTCACRKEECKRVSPPSCPPHRLPTLRKTQCCDEYECACNCVNSTVSCPLGYLASTATNDCGCTTTTCLPDKVCVHRSTIYPVGQFWEEGCDVCTCTDMEDAVMGLRVAQCSQKPCEDSCRSGFTYVLHEGECCGRCLPSACEVVTGSPRGDSQSSWKSVGSQWASPENPCLINECVRVKEEVFIQQRNVSCPQLEVPVCPSGFQLSCKTSACCPSCRCERMEACMLNGTVIGPGKTVMIDVCTTCRCMVQVGVISGFKLECRKTTCNPCPLGYKEENNTGECCGRCLPTACTIQLRGGQIMTLKRDETLQDGCDTHFCKVNERGEYFWEKRVTGCPPFDEHKCLAEGGKIMKIPGTCCDTCEEPECNDITARLQYVKVGSCKSEVEVDIHYCQGKCASKAMYSIDINDVQDQCSCCSPTRTEPMQVALHCTNGSVVYHEVLNAMECKCSPRKCSK

SEQ ID NO: 75 - protein, 219 aa, Homo sapiens
MLNIILIKFSSFSIRCAILSSVCLNEAITFAFLLQVFLWNMDKYTMIRKLEGHHHDVVACDFSPDGALLATASYDTRVYIWDPHNGDILMEFGHLFPPPTPIFAGGANDRWVRSVSFSHDGLHVASLADDKMVRFWRIDEDYPVQVAPLSNGLCCAFSTDGSVLAAGTHDGSVYFWATPRQVPSLQHLCRMSIRRVMPTQEVQELPIPSKLLEFLSYRI

SEQ ID NO: 76 - protein, 95 aa, Homo sapiens
DIQLTQSPSSLSASVGDRVTITCRVSQGISSYLNWYRQKPGKVPKLLIYSASNLQSGVPSRFSGSGSGTDFTLTISSLQPEDVATYYGQRTYNAP

SEQ ID NO: 77 - protein, 239 aa, Homo sapiens
MAWIPLLLPLLTLCTGSWAQSALIQPPSVSGSPGQSVTISCTGTSSDVGSYDYVSWYQQHPGTVPKPMIYNVNTQPSGVPDRFSGSKSGNTASMTISGLQAEDEADYYCAQRSLSDSLSLCYVFGTGTKVTVLGQPKANPTVTLFPPSSEELQANKATLVCLISDFYPGAVTVAWKADGSPVKAGVETTKPSKQSNNKYAASSYLSLTPEQWKSHRSYSCQVTHEGSTVEKTVAPTECS

SEQ ID NO: 78 - protein, 2544 aa, Homo sapiens
MVALSLKICVRHCNVVKTMQFEPSTAVYDACRVIRERVPEAQTGQASDYGLFLSDEDPRKGIWLEAGRTLDYYMLRNGDILEYKKKQRPQKIRMLDGSVKTVMVDDSKTVGELLVTICSRIGITNYEEYSLIQETIEEKKEEGTGTLKKDRTLLRDERKMEKLKAKLHTDDDLNWLDHSRTFREQGVDENETLLLRRKFFYSDQNVDSRDPVQLNLLYVQARDDILNGSHPVSFEKACEFGGFQAQIQFGPHVEHKHKPGFLDLKEFLPKEYIKQRGAEKRIFQEHKNCGEMSEIEAKVKYVKLARSLRTYGVSFFLVKEKMKGKNKLVPRLLGITKDSVMRVDEKTKEVLQEWPLTTVKRWAASPKSFTLDFGEYQESYYSVQTTEGEQISQLIAGYIDIILKKKQSKDRFGLEGDEESTMLEESVSPKKSTILQQQFNRTGKAEHGSVALPAVMRSGSSGPETFNVGSMPSPQQQVMVGQMHRGHMPPLTSAQQALMGTINTSMHAVQQAQDDLSELDSLPPLGQDMASRVWVQNKVDESKHEIHSQVDAITAGTASVVNLTAGDPADTDYTAVGCAITTISSNLTEMSKGVKLLAALMDDEVGSGEDLLRAARTLAGAVSDLLKAVQPTSGEPRQTVLTAAGSIGQASGDLLRQIGENETDERFQDVLMSLAKAVANAAAMLVLKAKNVAQVAEDTVLQNRVIAAATQCALSTSQLVACAKVVSPTISSPVCQEQLIEAGKLVDRSVENCVRACQAATTDSELLKQVSAAASVVSQALHDLLQHVRQFASRGEPIGRYDQATDTIMCVTESIFSSMGDAGEMVRQARVLAQATSDLVNAMRSDAEAEIDMENSKKLLAAAKLLADSTARMVEAAKGAAANPENEDQQQRLREAAEGLRVATNAAAQNAIKKKIVNRLEVAAKQAAAAATQTIAASQNAAVSNKNPAAQQQLVQSCKAVADHIPQLVQGVRGSQAQAEDLSAQLALIISSQNFLQPGSKMVSSAKAAVPTVSDQAAAMQLSQCAKNLATSLAELRTASQKAIAHEACGPMEIDSALNTVQTLKNELQDAKMAAVESQLKPLPGETLEKCAQDLGSTSKAVGSSMAQLLTCAAQGNEHYTGVAARETAQALKTLAQAARGVAASTTDPAAAHAMLDSARDVMEGSAMLIQEAKQALIAPGDAERQQRLAQVAKAVSHSLNNCVNCLPGQKDVDVALKSIGESSKKLLVDSLPPSTKPFQEAQSELNQAAADLNQSAGEVVHATRGQSGELAAASGKFSDDFDEFLDAGIEMAGQAQTKEDQIQVIGNLKNISMASSKLLLAAKSLSVDPGAPNAKNLLAAAARAVTESINQLITLCTQQAPGQKECDNALRELETVKGMLDNPNEPVSDLSYFDCIESVMENSKVLGESMAGISQNAKTGDLPAFGECVGIASKALCGLTEAAAQAAYLVGISDPNSQAGHQGLVDPIQFARANQAIQMACQNLVDPGSSPSQVLSAATIVAKHTSALCNACRIASSKTANPVAKRHFVQSAKEVANSTANLVKTIKALDGDFSEDNRNKCRIATAPLIEAVENLTAFASNPEFVSIPAQISSEGSQAQEPILVSAKTMLESSSYLIRTARSLAINPKDPPTWSVLAGHSHTVSDSIKSLITSIRDKAPGQRECDYSIDGINRCIRDIEQASLAAVSQSLATRDDISVEALQEQLTSVVQEIGHLIDPIATAARGEAAQLGHKVTQLASYFEPLILAAVGVASKILDHQQQMTVLDQTKTLAESALQMLYAAKEGGGNPKAQHTHDAITEAAQLMKEAVDDIMVTLNEAASEVGLVGGMVDAIAEAMSKLDEGTPPEPKGTFVDYQTTVVKYSKAIAVTAQEMMTKSVTNPEELGGLASQMTSDYGHLAFQGQMAAATAEPEEIGFQIRTRVQDLGHGCIFLVQKAGALQVCPTDSYTKRELIECARAVTEKVSLVLSALQAGNKGTQACITAATAVSGIIADLDTTIMFATAGTLNAENSETFADHRENILKTAKALVEDTKLLVSGAASTPDKLAQAAQSSAATITQLAEVVKLGAASLGSDDPETQVVLINAIKDVAKALSDLISATKGAASKPVDDPSMYQLKGAAKVMVTNVTSLLKTVKAVEDEATRGTRALEATIECIKQELTVFQSKDVPEKTSSPEESIRMTKGITMATAKAVAAGNSCRQEDVIATANLSRKAVSDMLTACKQASFHPDVSDEVRTRALRFGTECTLGYLDLLEHVLVILQKPTPEFKQQLAAFSKRVAGAVTELIQAAEAMKGTEWVDPEDPTVIAETELLGAAASIEAAAKKLEQLKPRAKPKQADETLDFEEQILEAAKSIAAATSALVKSASAAQRELVAQGKVGSIPANAADDGQWSQGLISAARMVAAATSSLCEAANASVQGHASEEKLISSAKQVAASTAQLLVACKVKADQDSEAMRRLQAAGNAVKRASDNLVRAAQKAAFGKADDDDVVVKTKFVGGIAQIIAAQEEMLKKERELEEARKKLAQIRQQQYKFLPTELREDEG

SEQ ID NO: 79 - protein, 3013 aa, Homo sapiens
MEEKQQIILANQDGGTVAGAAPTFFVILKQPGNGKTDQGILVTNQDACALASSVSSPVKSKGKICLPADCTVGGITVTLDNNSMWNEFYHRSTEMILTKQGRRMFPYCRYWITGLDSNLKYILVMDISPVDNHRYKWNGRWWEPSGKAEPHVLGRVFIHPESPSTGHYWMHQPVSFYKLKLTNNTLDQEGHIILHSMHRYLPRLHLVPAEKAVEVIQLNGPGVHTFTFPQTEFFAVTAYQNIQITQLKIDYNPFAKGFRDDGLNNKPQRDGKQKNSSDQEGNNISSSSGHRVRLTEGQGSEIQPGDLDPLSRGHETSGKGLEKTSLNIKRDFLGFMDTDSALSEVPQLKQEISECLIASSFEDDSRVASPLDQNGSFNVVIKEEPLDDYDYELGECPEGVTVKQEETDEETDVYSNSDDDPILEKQLKRHNKVDNPEADHLSSKWLPSSPSGVAKAKMFKLDTGKMPVVYLEPCAVTRSTVKISELPDNMLSTSRKDKSSMLAELEYLPTYIENSNETAFCLGKESENGLRKHSPDLRVVQKYPLLKEPQWKYPDISDSISTERILDDSKDSVGDSLSGKEDLGRKRTTMLKIATAAKVVNANQNASPNVPGKRGRPRKLKLCKAGRPPKNTGKSLISTKNTPVSPGSTFPDVKPDLEDVDGVLFVSFESKEALDIHAVDGTTEESSSLQASTTNDSGYRARISQLEKELIEDLKTLRHKQVIHPGLQEVGLKLNSVDPTMSIDLKYLGVQLPLAPATSFPFWNLTGTNPASPDAGFPFVSRTGKTNDFTKIKGWRGKFHSASASRNEGGNSESSLKNRSAFCSDKLDEYLENEGKLMETSMGFSSNAPTSPVVYQLPTKSTSYVRTLDSVLKKQSTISPSTSYSLKPHSVPPVSRKAKSQNRQATFSGRTKSSYKSILPYPVSPKQKYSHVILGDKVTKNSSGIISENQANNFVVPTLDENIFPKQISLRQAQQQQQQQQGSRPPGLSKSQVKLMDLEDCALWEGKPRTYITEERADVSLTTLLTAQASLKTKPIHTIIRKRAPPCNNDFCRLGCVCSSLALEKRQPAHCRRPDCMFGCTCLKRKVVLVKGGSKTKHFQRKAAHRDPVFYDTLGEEAREEEEGIREEEEQLKEKKKRKKLEYTICETEPEQPVRHYPLWVKVEGEVDPEPVYIPTPSVIEPMKPLLLPQPEVLSPTVKGKLLTGIKSPRSYTPKPNPVIREEDKDPVYLYFESMMTCARVRVYERKKEDQRQPSSSSSPSPSFQQQTSCHSSPENHNNAKEPDSEQQPLKQLTCDLEDDSDKLQEKSWKSSCNEGESSSTSYMHQRSPGGPTKLIEIISDCNWEEDRNKILSILSQHINSNMPQSLKVGSFIIELASQRKSRGEKNPPVYSSRVKISMPSCQDQDDMAEKSGSETPDGPLSPGKMEDISPVQTDALDSVRERLHGGKGLPFYAGLSPAGKLVAYKRKPSSSTSGLIQVASNAKVAASRKPRTLLPSTSNSKMASSSGTATNRPGKNLKAFVPAKRPIAARPSPGGVFTQFVMSKVGALQQKIPGVSTPQTLAGTQKFSIRPSPVMVVTPVVSSEPVQVCSPVTAAVTTTTPQVFLENTTAVTPMTAISDVETKETTYSSGATTTGVVEVSETNTSTSVTSTQSTATVNLTKTTGITTPVASVAFPKSLVASPSTITLPVASTASTSLVVVTAAASSSMVTTPTSSLGSVPIILSGINGSPPVSQRPENAAQIPVATPQVSPNTVKRAGPRLLHPNGQIVQLLPLHQLRGSNTQPNLQPVMFRNPGSVMGIRLPAPSKPSETPPSSTSSSAFSVMNPVIQAVGSSSAVNVITQAPSLLSSGASFVSQAGTLTLRISPPEPQSFASKTGSETKITYSSGGQPVGTASLIPLQSGSFALLQLPGQKPVPSSILQHVASLQMKRESQNPDQKDETNSIKREQETKKVLQSEGEAVDPEANVIKQNSGAATSEETLNDSLEDRGDHLDEECLPEEGCATVKPSEHSCITGSHTDQDYKDVNEEYGARNRKSSKEKVAVLEVRTIKVQHQKLGDVKVEQQKGFDNPEENSSEFPVTFKEESKFELSGSKVMEQQSNLQPEAKEKECGDSLEKDRERWRKHLKGPLTRKCVGASQECKKEADEQLIKETKTCQENSDVFQQEQGISDLLGKSGITEDARVLKTECDSWSRISNPSAFSIVPRRAAKSSRGNGHFQGHLLLPGEQIQPKQEKKGGRSSADFTVLDLEEDDEDDNEKTDDSIDEIVDVVSDYQSEEVDDVEKNNCVEYIEDDEEHVDIETVEELSEEINVAHLKTTAAHTQSFKQPSCTHISADEKAAERSRKAPPIPLKLKPDYWSDKLQKEAEAFAYYRRTHTANERRRRGEMRDLFEKLKITLGLLHSSKVSKSLILTRAFSEIQGLTDQADKLIGQKNLLTRKRNILIRKVSSLSGKTEEVVLKKLEYIYAKQQALEAQKRKKKMGSDEFDISPRISKQQEGSSASSVDLGQMFINNRRGKPLILSRKKDQATENTSPLNTPHTSANLVMTPQGQLLTLKGPLFSGPVVAVSPDLLESDLKPQVAGSAVALPENDDLFMMPRIVNVTSLATEGGLVDMGGSKYPHEVPDSKPSDHLKDTVRNEDNSLEDKGRISSRGNRDGRVTLGPTQVFLANKDSGYPQIVDVSNMQKAQEFLPKKISGDMRGIQYKWKESESRGERVKSKDSSFHKLKMKDLKDSSIEMELRKVTSAIEEAALDSSELLTNMEDEDDTDETLTSLLNEIAFLNQQLNDDSVGLAELPSSMDTEFPGDARRAFISKVPPGSRATFQVEHLGTGLKELPDVQGESDSISPLLLHLEDDDFSENEKQLAEPASEPDVLKIVIDSEIKDSLLSNKKAIDGGKNTSGLPAEPESVSSPPTLHMKTGLENSNSTDTLWRPMPKLAPLGLKVANPSSDADGQSLKVMPCLAPIAAKVGSVGHKMNLTGNDQEGRESKVMPTLAPVVAKLGNSGASPSSAGK

SEQ ID NO: 80 - protein, 195 aa, Homo sapiens
MAPPVRYCIPGERLCNLEEGSPGSGTYTRHGYIFSSLAGCLMKSSENGALPVVSVVRETESQLLPDVGAIVTCKVSSINSRFAKVHILYVGSMPLKNSFRGTIRKEDVRATEKDKVEIYKSFRPGDIVLAKVISLGDAQSNYLLTTAENELGVVVAHSESGIQMVPISWCEMQCPKTHTKEFRKVARVQPEFLQT

SEQ ID NO: 81 - protein, 3939 aa, Homo sapiens
MSSSDEETLSERSCRSERSCRSERSYRSERSGSLSPCPPGDTLPWNLPLHEQKKRKSQDSVLDPAERAVVRVADERDRVQKKTFTKWVNKHLMKVRKHINDLYEDLRDGHNLISLLEVLSGIKLPREKGRMRFHRLQNVQIALDFLKQRQVKLVNIRNDDITDGNPKLTLGLIWTIILHFQISDIYISGESGDMSAKEKLLLWTQKVTAGYTGIKCTNFSSCWSDGKMFNALIHRYRPDLVDMERVQIQSNRENLEQAFEVAERLGVTRLLDAEDVDVPSPDEKSVITYVSSIYDAFPKVPEGGEGISATEVDSRWQEYQSRVDSLIPWIKQHTILMSDKTFPQNPVELKALYNQYIHFKETEILAKEREKGRIEELYKLLEVWIEFGRIKLPQGYHPNDVEEEWGKLIIEMLEREKSLRPAVERLELLLQIANKIQNGALNCEEKLTLAKNTLQADAAHLESGQPVQCESDVIMYIQECEGLIRQLQVDLQILRDENYYQLEELAFRVMRLQDELVTLRLECTNLYRKGHFTSLELVPPSTLTTTHLKAEPLTKATHSSSTSWFRKPMTRAELVAISSSEDEGNLRFVYELLSWVEEMQMKLERAEWGNDLPSVELQLETQQHIHTSVEELGSSVKEARLYEGKMSQNFHTSYAETLGKLETQYCKLKETSSFRMRHLQSLHKFVSRATAELIWLNEKEEEELAYDWSDNNSNISAKRNYFSELTMELEEKQDVFRSLQDTAELLSLENHPAKQTVEAYSAAVQSQLQWMKQLCLCVEQHVKENTAYFQFFSDARELESFLRNLQDSIKRKYSCDHNTSLSRLEDLLQDSMDEKEQLIQSKSSVASLVGRSKTIVQLKPRSPDHVLKNTISVKAVCDYRQIEITICKNDECVLEDNSQRTKWKVISPTGNEAMVPSVCFLIPPPNKDAIEMASRVEQSYQKVMALWHQLHVNTKSLISWNYLRKDLDLVQTWNLEKLRSSAPGECHQIMKNLQAHYEDFLQDSRDSVLFSVADRLRLEEEVEACKARFQHLMKSMENEDKEETVAKMYISELKNIRLRLEEYEQRVVKRIQSLASSRTDRDAWQDNALRIAEQEHTQEDLQQLRSDLDAVSMKCDSFLHQSPSSSSVPTLRSELNLLVEKMDHVYGLSTVYLNKLKTVDVIVRSIQDAELLVKGYEIKLSQEEVVLADLSALEAHWSTLRHWLSDVKDKNSVFSVLDEEIAKAKVVAEQMSRLTPERNLDLERYQEKGSQLQERWHRVIAQLEIRQSELESIQEVLGDYRACHGTLIKWIEETTAQQEMMKPGQAEDSRVLSEQLSQQTALFAEIERNQTKLDQCQKFSQQYSTIVKDYELQLMTYKAFVESQQKSPGKRRRMLSSSDAITQEFMDLRTRYTALVTLTTQHVKYISDALRRLEEEEKVVEEEKQEHVEKVKELLGWVSTLARNTQGKATSSETKESTDIEKAILEQQVLSEELTTKKEQVSEAIKTSQIFLAKHGHKLSEKEKKQISEQLNALNKAYHDLCDGSANQLQQLQSQLAHQTEQKTLQKQQNTCHQQLEDLCSWVGQAERALAGHQGRTTQQDLSALQKNQSDLKDLQDDIQNRATSFATVVKDIEGFMEENQTKLSPRELTALREKLHQAKEQYEALQEETRVAQKELEEAVTSALQQETEKSKAAKELAENKKKIDALLDWVTSVGSSGGQLLTNLPGMEQLSGASLEKGALDTTDGYMGVNQAPEKLDKQCEMMKARHQELLSQQQNFILATQSAQAFLDQHGHNLTPEEQQMLQQKLGELKEQYSTSLAQSEAELKQVQTLQDELQKFLQDHKEFESWLERSEKELENMHKGGSSPETLPSLLKRQGSFSEDVISHKGDLRFVTISGQKVLDMENSFKEGKEPSEIGNLVKDKLKDATERYTALHSKCTRLGSHLNMLLGQYHQFQNSADSLQAWMQACEANVEKLLSDTVASDPGVLQEQLATTKQLQEELAEHQVPVEKLQKVARDIMEIEGEPAPDHRHVQETTDSILSHFQSLSYSLAERSSLLQKAIAQSQSVQESLESLLQSIGEVEQNLEGKQVSSLSSGVIQEALATNMKLKQDIARQKSSLEATREMVTRFMETADSTTAAVLQGKLAEVSQRFEQLCLQQQEKESSLKKLLPQAEMFEHLSGKLQQFMENKSRMLASGNQPDQDITHFFQQIQELNLEMEDQQENLDTLEHLVTELSSCGFALDLCQHQDRVQNLRKDFTELQKTVKEREKDASSCQEQLDEFRKLVRTFQKWLKETEGSIPPTETSMSAKELEKQIEHLKSLLDDWASKGTLVEEINCKGTSLENLIMEITAPDSQGKTGSILPSVGSSVGSVNGYHTCKDLTEIQCDMSDVNLKYEKLGGVLHERQESLQAILNRMEEVHKEANSVLQWLESKEEVLKSMDAMSSPTKTETVKAQAESNKAFLAELEQNSPKIQKVKEALAGLLVTYPNSQEAENWKKIQEELNSRWERATEVTVARQRQLEESASHLACFQAAESQLRPWLMEKELMMGVLGPLSIDPNMLNAQKQQVQFMLKEFEARRQQHEQLNEAAQGILTGPGDVSLSTSQVQKELQSINQKWVELTDKLNSRSSQIDQAIVKSTQYQELLQDLSEKVRAVGQRLSVQSAISTQPEAVKQQLEETSEIRSDLEQLDHEVKEAQTLCDELSVLIGEQYLKDELKKRLETVALPLQGLEDLAADRINRLQAALASTQQFQQMFDELRTWLDDKQSQQAKNCPISAKLERLQSQLQENEEFQKSLNQHSGSYEVIVAEGESLLLSVPPGEEKRTLQNQLVELKNHWEELSKKTADRQSRLKDCMQKAQKYQWHVEDLVPWIEDCKAKMSELRVTLDPVQLESSLLRSKAMLNEVEKRRSLLEILNSAADILINSSEADEDGIRDEKAGINQNMDAVTEELQAKTGSLEEMTQRLREFQESFKNIEKKVEGAKHQLEIFDALGSQACSNKNLEKLRAQQEVLQALEPQVDYLRNFTQGLVEDAPDGSDASQLLHQAEVAQQEFLEVKQRVNSGCVMMENKLEGIGQFHCRVREMFSQLADLDDELDGMGAIGRDTDSLQSQIEDVRLFLNKIHVLKLDIEASEAECRHMLEEEGTLDLLGLKRELEALNKQCGKLTERGKARQEQLELTLGRVEDFYRKLKGLNDATTAAEEAEALQWVVGTEVEIINQQLADFKMFQKEQVDPLQMKLQQVNGLGQGLIQSAGKDCDVQGLEHDMEEINARWNTLNKKVAQRIAQLQEALLHCGKFQDALEPLLSWLADTEELIANQKPPSAEYKVVKAQIQEQKLLQRLLDDRKATVDMLQAEGGRIAQSAELADREKITGQLESLESRWTELLSKAAARQKQLEDILVLAKQFHETAEPISDFLSVTEKKLANSEPVGTQTAKIQQQIIRHKALEEDIENHATDVHQAVKIGQSLSSLTSPAEQGVLSEKIDSLQARYSEIQDRCCRKAALLDQALSNARLFGEDEVEVLNWLAEVEDKLSSVFVKDFKQDVLHRQHADHLALNEEIVNRKKNVDQAIKNGQALLKQTTGEEVLLIQEKLDGIKTRYADITVTSSKALRTLEQARQLATKFQSTYEELTGWLREVEEELATSGGQSPTGEQIPQFQQRQKELKKEVMEHRLVLDTVNEVSRALLELVPWRAREGLDKLVSDANEQYKLVSDTIGQRVDEIDAAIQRSQQYEQAADAELAWVAETKRKLMALGPIRLEQDQTTAQLQVQKAFSIDIIRHKDSMDELFSHRSEIFGTCGEEQKTVLQEKTESLIQQYEAISLLNSERYARLERAQVLVNQFWETYEELSPWIEETRALIAQLPSPAIDHEQLRQQQEEMRQLRESIAEHKPHIDKLLKIGPQLKELNPEEGEMVEEKYQKAENMYAQIKEEVRQRALALDEAVSQSTQICLVS

SEQ ID NO: 82 - protein, 377 aa, Homo sapiens
MCEEEDSTALVCDNGSGLCKAGFAGDDAPRAVFPSIVGRPRHQGVMVGMGQKDSYVGDEAQSKRGILTLKYPIEHGIITNWDDMEKIWHHSFYNELRVAPEEHPTLLTEAPLNPKANREKMTQIMFETFNVPAMYVAIQAVLSLYASGRTTGIVLDSGDGVTHNVPIYEGYALPHAIMRLDLAGRDLTDYLMKILTERGYSFVTTAEREIVRDIKEKLCYVALDFENEMATAASSSSLEKSYELPDGQVITIGNERFRCPETLFQPSFIGMESAGIHETTYNSIMKCDIDIRKDLYANNVLSGGTTMYPGIADRMQKEITALAPSTMKIKIIAPPERKYSVWIGGSILASLSTFQQMWISKQEYDEAGPSIVHRKCF

SEQ ID NO: 83 - protein, 2436 aa, Homo sapiens
MGFLHQLQLLLWKNVTLKRRSPWVLAFEIFIPLVLFFILLGLRQKKPTISVKEVSFYTAAPLTSAGILPVMQSLCPDGQRDEFGFLQYANSTVTQLLERLDRVVEEGNLFDPARPSLGSELEALRQHLEALSAGPGTSGSHLDRSTVSSFSLDSVARNPQELWRFLTQNLSLPNSTAQALLAARVDPPEVYHLLFGPSSALDSQSGLHKGQEPWSRLGGNPLFRMEELLLAPALLEQLTCTPGSGELGRILTVPESQKGALQGYRDAVCSGQAAARARRFSGLSAELRNQLDVAKVSQQLGLDAPNGSDSSPQAPPPRRLQALLGDLLDAQKVLQDVDVLSALALLLPQGACTGRTPGPPASGAGGAANGTGAGAVMGPNATAEEGAPSAAALATPDTLQGQCSAFVQLWAGLQPILCGNNRTIEPEALRRGNMSSLGFTSKEQRNLGLLVHLMTSNPKILYAPAGSEVDRVILKANETFAFVGNVTHYAQVWLNISAEIRSFLEQGRLQQHLRWLQQYVAELRLHPEALNLSLDELPPALRQDNFSLPSGMALLQQLDTIDNAACGWIQFMSKVSVDIFKGFPDEESIVNYTLNQAYQDNVTVFASVIFQTRKDGSLPPHVHYKIRQNSSFTEKTNEIRRAYWRPGPNTGGRFYFLYGFVWIQDMMERAIIDTFVGHDVVEPGSYVQMFPYPCYTRDDFLFVIEHMMPLCMVISWVYSVAMTIQHIVAEKEHRLKEVMKTMGLNNAVHWVAWFITGFVQLSISVTALTAILKYGQVLMHSHVVIIWLFLAVYAVATIMFCFLVSVLYSKAKLASACGGIIYFLSYVPYMYVAIREEVAHDKITAFEKCIASLMSTTAFGLGSKYFALYEVAGVGIQWHTFSQSPVEGDDFNLLLAVTMLMVDAVVYGILTWYIEAVHPGMYGLPRPWYFPLQKSYWLGSGRTEAWEWSWPWARTPRLSVMEEDQACAMESRRFEETRGMEEEPTHLPLVVCVDKLTKVYKDDKKLALNKLSLNLYENQVVSFLGHNGAGKTTTMSILTGLFPPTSGSATIYGHDIRTEMDEIRKNLGMCPQHNVLFDRLTVEEHLWFYSRLKSMAQEEIRREMDKMIEDLELSNKRHSLVQTLSGGMKRKLSVAIAFVGGSRAIILDEPTAGVDPYARRAIWDLILKYKPGRTILLSTHHMDEADLLGDRIAIISHGKLKCCGSPLFLKGTYGDGYRLTLVKRPAEPGGPQEPGLASSPPGRAPLSSCSELQVSQFIRKHVASCLLVSDTSTELSYILPSEAAKKGAFERLFQHLERSLDALHLSSFGLMDTTLEEVFLKVSEEDQSLENSEADVKESRKDVLPGAEGPASGEGHAGNLARCSELTQSQASLQSASSVGSARGDEGAGYTDVYGDYRPLFDNPQDPDNVSLQEVEAEALSRVGQGSRKLDGGWLKVRQFHGLLVKRFHCARRNSKALFSQILLPAFFVCVAMTVALSVPEIGDLPPLVLSPSQYHNYTQPRGNFIPYANEERREYRLRLSPDASPQQLVSTFRLPSGVGATCVLKSPANGSLGPTLNLSSGESRLLAARFFDSMCLESFTQGLPLSNFVPPPPSPAPSDSPASPDEDLQAWNVSLPPTAGPEMWTSAPSLPRLVREPVRCTCSAQGTGFSCPSSVGGHPPQMRVVTGDILTDITGHNVSEYLLFTSDRFRLHRYGAITFGNVLKSIPASFGTRAPPMVRKIAVRRAAQVFYNNKGYHSMPTYLNSLNNAILRANLPKSKGNPAAYGITVTNHPMNKTSASLSLDYLLQGTDVVIAIFIIVAMSFVPASFVVFLVAEKSTKAKHLQFVSGCNPIIYWLANYVWDMLNYLVPATCCVIILFVFDLPAYTSPTNFPAVLSLFLLYGWSITPIMYPASFWFEVPSSAYVFLIVINLFIGITATVATFLLQLFEHDKDLKVVNSYLKSCFLIFPNYNLGHGLMEMAYNEYINEYYAKIGQFDKMKSPFEWDIVTRGLVAMAVEGVVGFLLTIMCQYNFLRRPQRMPVSTKPVEDDVDVASERQRVLRGDADNDMVKIENLTKVYKSRKIGRILAVDRLCLGVRPGECFGLLGVNGAGKTSTFKMLTGDESTTGGEAFVNGHSVLKELLQVQQSLGYCPQCDALFDELTAREHLQLYTRLRGISWKDEARVVKWALEKLELTKYADKPAGTYSGGNKRKLSTAIALIGYPAFIFLDEPTTGMDPKARRFLWNLILDLIKTGRSVVLTSHSMEECEALCTRLAIMVNGRLRCLGSIQHLKNRFGDGYMITVRTKSSQSVKDVVRFFNRNFPEAMLKERHHTKVQYQLKSEHISLAQVFSKMEQVSGVLGIEDYSVSQTTLDNVFVNFAKKQSDNLEQQETEPPSALQSPLGCLLSLLRPRSAPTELRALVADEPEDLDTEDEGLISFEEERAQLSFNTDTLC

SEQ ID NO: 84 - protein, 532 aa, Homo sapiens
MPQLYIYIRLLGAYLFIISRVQGQNLDSMLHGTGMKSDSDQKKSENGVTLAPEDTLPFLKCYCSGHCPDDAINNTCITNGHCFAIIEEDDQGETTLASGCMKYEGSDFQCKDSPKAQLRRTIECCRTNLCNQYLQPTLPPVVIGPFFDGSIRWLVLLISMAVCIIAMIIFSSCFCYKHYCKSISSRRRYNRDLEQDEAFIPVGESLKDLIDQSQSSGSGSGLPLLVQRTIAKQIQMVRQVGKGRYGEVWMGKWRGEKVAVKVFFTTEEASWFRETEIYQTVLMRHENILGFIAADIKGTGSWTQLYLITDYHENGSLYDFLKCATLDTRALLKLAYSAACGLCHLHTEIYGTQGKPAIAHRDLKSKNILIKKNGSCCIADLGLAVKFNSDTNEVDVPLNTRVGTKRYMAPEVLDESLNKNHFQPYIMADIYSFGLIIWEMARRCITGGIVEEYQLPYYNMVPSDPSYEDMREVVCVKRLRPIVSNRWNSDECLRAVLKLMSECWAHNPASRLTALRIKKTLAKMVESQDVKI

SEQ ID NO: 85 - protein, 133 aa, Homo sapiens
METNINWGARVFLADFQAQKVITNPAGKGLGEVLKVKTTAVNFQHKGIPPKNHLGALLNLYCFFQHKNNFRGDWGFQSSLALTASWEQHGSFPNHGGVNAGLWGKKSLMGGNKWALALQMVPSPPLTGILLAL

SEQ ID NO: 86 - protein, 3210 aa, Homo sapiens
MSWALEEWKEGLPTRTLQKIQELEGQLDKLKKEKQQRQFQLDSLEAAPQKQTQKVENEKTEGTNLKRENQRLMEICESLEKTKQKISHELQVKESQVNFQEGQLNSGKKQIEKLEQELKRCKSELERSQQAAQSADVSLNPCNTPQKIFTTPLTPSQYYSGSKYEDLKEKYNKEVEERKRLEAEVKALQAKKASQTLPQATMNHRDIARHQASSSVFSWQQEKTPSHLSSNSQRTPIRRDFSASYFSGELEVTPSRSTLQIGKRDANSSFFGNSSSPHLLDQLKAQNQELRNKINELELRLQGHEKEMKGQVNKFQELQLQLEKAKVELIEKEKVLNKCRDELVRTTAQYDQASTKYTALEQKLKKLTEDLSCQRQNAESARCSLEQKIKEKEKEFQEELSRQQRSFQTLDQECIQMKARLTQELQQAKNMHNVLQAELDKLTSVKQQLENNLEEFKQKLCRAEQAFQASQIKENELRRSMEEMKKENNLLKSHSEQKAREVCHLEAELKNIKQCLNQSQNFAEEMKAKNTSQETMLRDLQEKINQQENSLTLEKLKLAVADLEKQRDCSQDLLKKREHHIEQLNDKLSKTEKESKALLSALELKKKEYEELKEEKTLFSCWKSENEKLLTQMESEKENLQSKINHLETCLKTQQIKSHEYNERVRTLEMDRENLSVEIRNLHNVLDSKSVEVETQKLAYMELQQKAEFSDQKHQKEIENMCLKTSQLTGQVEDLEHKLQLLSNEIMDKDRCYQDLHAEYESLRDLLKSKDASLVTNEDHQRSLLAFDQQPAMHHSFANIIGEQGSMPSERSECRLEADQSPKNSAILQNRVDSLEFSLESQKQMNSDLQKQCEELVQIKGEIEENLMKAEQMHQSFVAETSQRISKLQEDTSAHQNVVAETLSALENKEKELQLLNDKVETEQAEIQELKKSNHLLEDSLKELQLLSETLSLEKKEMSSIISLNKREIEELTQENGTLKEINASLNQEKMNLIQKSESFANYIDEREKSISELSDQYKQEKLILLQRCEETGNAYEDLSQKYKAAQEKNSKLECLLNECTSLCENRKNELEQLKEAFAKEHQEFLTKLAFAEERNQNLMLELETVQQALRSEMTDNQNNSKSEAGGLKQEIMTLKEEQNKMQKEVNDLLQENEQLMKVMKTKHECQNLESEPIRNSVKERESERNQCNFKPQMDLEVKEISLDSYNAQLVQLEAMLRNKELKLQESEKEKECLQHELQTIRGDLETSNLQDMQSQEISGLKDCEIDAEEKYISGPHELSTSQNDNAHLQCSLQTTMNKLNELEKICEILQAEKYELVTELNDSRSECITATRKMAEEVGKLLNEVKILNDDSGLLHGELVEDIPGGEFGEQPNEQHPVSLAPLDESNSYEHLTLSDKEVQMHFAELQEKFLSLQSEHKILHDQHCQMSSKMSELQTYVDSLKAENLVLSTNLRNFQGDLVKEMQLGLEEGLVPSLSSSCVPDSSSLSSLGDSSFYRALLEQTGDMSLLSNLEGAVSANQCSVDEVFCSSLQTYVDSLKAENLVLSTNLRNFQGDLVKEMQLGLEEGLVPSLSSSCVPDSSSLSSLGDSSFYRALLEQTGDMSLLSNLEGVVSANQCSVDEVFCSSLQEENLTRKETPSAPAKGVEELESLCEVYRQSLEKLEEKMESQGIMKNKEIQELEQLLSSERQELDCLRKQYLSENEQWQQKLTSVTLEMESKLAAEKKQTEQLSLELEVARLQLQGLDLSSRSLLGIDTEDAIQGRNESCDISKEHTSETTERTPKHDVHQICDKDAQQDLNLDIEKITETGAVKPTGECSGEQSPDTNYEPPGEDKTQGSSECISELSFSGPNALVPMDFLGNQEDIHNLQLRVKETSNENLRLLHVIEDRDRKVESLLNEMKELDSKLHLQEVQLMTKIEACIELEKIVGELKKENSDLSEKLEYFSCDHQELLQRVETSEGLNSDLEMHADKSSREDIGDNVAKVNDSWKERFLDVENELSRIRSEKASIEHEALYLEADLEVVQTEKLCLEKDNENKQKVIVCLEEELSVVTSERNQLRGELDTMSKKTTALDQLSEKMKEKTQELESHQSECLHCIQVAEAEVKEKTELLQTLSSDVSELLKDKTHLQEKLQSLEKDSQALSLTKCELENQIAQLNKEKELLVKESESLQARLSESDYEKLNVSKALEAALVEKGEFALRLSSTQEEVHQLRRGIEKLRVRIEADEKKQLHIAEKLKERERENDSLKDKVENLERELQMSEENQELVILDAENSKAEVETLKTQIEEMARSLKVFELDLVTLRSEKENLTKQIQEKQGQLSELDKLLSSFKSLLEEKEQAEIQIKEESKTAVEMLQNQLKELNEAVAALCGDQEIMKATEQSLDPPIEEEHQLRNSIEKLRARLEADEKKQLCVLQQLKESEHHADLLKGRVENLERELEIARTNQEHAALEAENSKGEVETLKAKIEGMTQSLRGLELDVVTIRSEKEDLTNELQKEQERISELEIINSSFENILQEKEQEKVQMKEKSSTAMEMLQTQLKELNERVAALHNDQEACKAKEQNLSSQVECLELEKAQLLQGLDEAKNNYIVLQSSVNGLIQEVEDGKQKLEKKDEEISRLKNQIQDQEQLVSKLSQVEGEHQLWKEQNLELRNLTVELEQKIQVLQSKNASLQDTLEVLQSSYKNLENELELTKMDKMSFVEKVNKMTAKETELQREMHEMAQKTAELQEELSGEKNRLAGELQLLLEEIKSSKDQLKELTLENSELKKSLDCMHKDQVEKEGKVREEIAEYQLRLHEAEKKHQALLLDTNKQYEVEIQTYREKLTSKEECLSSQKLEIDLLKSSKEELNNSLKATTQILEELKKTKMDNLKYVNQLKKENERAQGKMKLLIKSCKQLEEEKEILQKELSQLQAAQEKQKTGTVMDTKVDELTTEIKELKETLEEKTKEADEYLDKYCSLLISHEKLEKAKEMLETQVAHLCSQQSKQDSRGSPLLGPVVPGPSPIPSVTEKRLSSGQNKASGKRQRSSGIWENGGGPTPATPESFSKKSKKAVMSGIHPAEDTEGTEFEPEGLPEVVKKGFADIPTGKTSPYILRRTTMATRTSPRLAAQKLALSPLSLGKENLAESSKPTAGGSRSQKVKVAQRSPVDSGTILREPTTKSVPVNNLPERSPTDSPREGLRVKRGRLVPSPKAGLESKGSENCKVQ

SEQ ID NO: 87 - protein, 586 aa, Homo sapiens
MGVNAVHWFRKGLRLHDNPALKECIQGADTIRCVYILDPWFAGSSNVGINRWRFLLQCLEDLDANLRKLNSRLFVIRGQPADVFPRLFKEWNITKLSIEYDSEPFGKERDAAIKKLATEAGVEVIVRISHTLYDLDKIIELNGGQPPLTYKRFQTLISKMEPLEIPVETITSEVIEKCTTPLSDDHDEKYGVPSLEELGFDTDGLSSAVWPGGETEALTRLERHLERKAWVANFERPRMNANSLLASPTGLSPYLRFGCLSCRLFYFKLTDLYKKVKKNSSPPLSLYGQLLWREFFYTAATNNPRFDKMEGNPICVQIPWDKNPEALAKWAEGRTGFPWIDAIMTQLRQEGWIHHLARHAVACFLTRGDLWISWEEGMKVFEELLLDADWSINAGSWMWLSCSSFFQQFFHCYCPVGFGRRTDPNGDYIRRYLPVLRGFPAKYIYDPWNAPEGIQKVAKCLIGVNYPKPMVNHAEASRLNIERMKQIYQQLSRYRGLGLLASVPSNPNGNGGFMGYSAENIPGCSSSGSCSQGSGILHYAHGDSQQTHLLKQGRSSMGTGLSGGKRPSQEEDTQSIGPKVQRQSTN

SEQ ID NO: 88 - protein, 675 aa, Homo sapiens
MEGRPPPEGRPPPRPRTGRAPRGRRRAVFAAVLHWSHITHLFENDRHFSHLSTLEREMAFRTEMGLYYSYFKTIVEAPSFLNGVWMIMNDKLTEYPLVINTLKRFNLYPEVILASWYRIYTKIMDLIGIQTKICWTVTRGEGLSPIESCEGLGDPACFYVAVIFILNGLMMALFFIYGTYLSGSRLGGLVTVLCFFFNHGECTRVMWTPPLRESFSYPFLVLQMLLVTHILRATKLYRGSLIALCISNVFFMLPWQFAQFVLLTQIASLFAVYVVGYIDICKLRKIIYIHMISLALCFVLMFGNSMLLTSYYASSLVIIWGILAMKPHFLKINVSELSLWVIQGCFWLFGTVILKYLTSKIFGIADDAHIGNLLTSKFFSYKDFDTLLYTCAAEFDFMEKETPLRYTKTLLLPVVLVVFVAIVRKIISDMWGVLAKQQTHVRKHQFDHGELVYHALQLLAYTALGILIMRLKLFLTPHMCVMASLICSRQLFGWLFCKVHPGAIVFAILAAMSIQGSANLQTQWNIVGEFSNLPQEELIEWIKYSTKPDAVFAGAMPTMASVKLSALRPIVNHPHYEDAGLRARTKIVYSMYSRKAAEEVKRELIKLKVNYYILEESWCVRRSKPGCSMPEIWDVEDPANAGKTPLCNLLVKDSKPHFTTVFQNSVYKVLEVVKE

SEQ ID NO: 89 - protein, 725 aa, Homo sapiens
MAMAMSDSGASRLRRQLESGGFEARLYVKQLSQQSDGDRDLQEHRQRIQALAEETAQNLKRNVYQNYRQFIETAREISYLESEMYQLSHLLTEQKSSLESIPLTLLPAAAAAGAAAASGGEEGVGGAGGRDHLRGQAGFFSTPGGASRDGSGPGEEGKQRTLTTLLEKVEGCRHLLETPGQYLVYNGDLVEYDADHMAQLQRVHGFLMNDCLLVATWLPQRRGMYRYNALYSLDGLAVVNVKDNPPMKDMFKLLMFPESRIFQAENAKIKREWLEVLEDTKRALSEKRRREQEEAAAPRGPPQVTSKATNPFEDDEEEEPAVPEVEEEKVDLSMEWIQELPEDLDVCIAQRDFEGAVDLLDKLNHYLEDKPSPPPVKELRAKVEERVRQLTEVLVFELSPDRSLRGGPKATRRAVSQLIRLGQCTKACELFLRNRAAAVHTAIRQLRIEGATLLYIHKLCHVFFTSLLETAREFEIDFAGTDSGCYSAFVVWARSAMGMFVDAFSKQVFDSKESLSTAAECVKVAKEHCQQLGDIGLDLTFIIHALLVKDIQGALHSYKEIIIEATKHRNSEEMWRRMNLMTPEALGKLKEEMKSCGVSNFEQYTGDDCWVNLSYTVVAFTKQTMGFLEEALKLYFPELHMVLLESLVEIILVAVQHVDYSLRCEQDPEKKAFIRQNASFLYETVLPVVEKRFEEGVGKPAKQLQDLRNASRLIRVNPESTTSVV

SEQ ID NO: 90 - protein, 523 aa, Homo sapiens
MQRAAALVRRGCGPRTPSSWGRSQSSAAAEASAVLKVRPERSRRERILTLESMNPQVKAVEYAVRGPIVLKAGEIELELQRGIKKPFTEVIRANIGDAQAMGQQPITFLRQVMALCTYPNLLDSPSFPEDAKKRARRILQACGGNSLGSYSASQGVNCIREDVAAYITRRDGGVPADPDNIYLTTGASDGISTILKILVSGGGKSRTGVMIPIPQYPLYSAVISELDAIQVNYYLDEENCWALNVNELRRAVQEAKDHCDPKVLCIINPGNPTGQVQSRKCIEDVIHFAWEEKLFLLADEVYQDNVYSPDCRFHSFKKVLYEMGPEYSSNVELASFHSTSKGYMGECGYRGGYMEVINLHPEIKGQLVKLLSVRLCPPVSGQAAMDIVVNPPVAGEESFEQFSREKESVLGNLAKKAKLTEDLFNQVPGIHCNPLQGAMYAFPRIFIPAKAVEAAQAHQMAPDMFYCMKLLEETGICVVPGSGFGQREGTYHFRMTILPPVEKLKTVLQKVKDFHINFLEKYA

SEQ ID NO: 91 - protein, 1583 aa, Homo sapiens
MKQEVEDSVTKMGDAHKELEQSHINYVKEIENLKNELMAVRSKYSEDKANLQKQLEEAMNTQLELSEQLKFQNNSEDNVKKLQEEIEKIRPGFEEQILYLQKQLDATTDEKKETVTQLQNIIEANSQHYQKNINSLQEELLQLKAIHQEEVKELMCQIEASAKEHEAEINKLNELKENLVKQCEASEKNIQKKYECELENLRKATSNANQDNQICSILLQENTFVEQVVNEKVKHLEDTLKELESQHSILKDEVTYMNNLKLKLEMDAQHIKDEFFHEREDLEFKINELLLAKEEQGCVIEKLKSELAGLNKQFCYTVEQHNREVQSLKEQHQKEISELNETFLSDSEKEKLTLMFEIQGLKEQCENLQQEKQEAILNYESLREIMEILQTELGESAGKISQEFESMKQQQASDVHELQQKLRTAFTEKDALLETVNRLQGENEKLLSQQELVPELENTIKNLQEKNGVYLLSLSQRDTMLKELEGKINSLTEEKDDFINKLKNSHEEMDNFHKKCEREERLILELGKKVEQTIQYNSELEQKVNELTGGLEETLKEKDQNDQKLEKLMVQMKVLSEDKEVLSAEVKSLYEENNKLSSEKKQLSRDLEVFLSQKEDVILKEHITQLEKKLQLMVEEQDNLNKLLENEQVQKLFVKTQLYGFLKEMGSEVSEDSEEKDVVNVLQAVGESLAKINEEKCNLAFQRDEKVLELEKEIKCLQEESVVQCEELKSLLRDYEQEKVLLRKELEEIQSEKEALQSDLLEMKNANEKTRLENQNLLIQVEEVSQTCSKSEIHNEKEKCFIKEHENLKPLLEQKELRDRRAELILLKDSLAKSPSVKNDPLSSVKELEEKIENLEKECKEKEEKINKIKLVAVKAKKELDSSRKETQTVKEELESLRSEKDQLSASMRDLIQGAESYKNLLLEYEKQSEQLDVEKERANNFEHRIEDLTRQLRNSTLQCETINSDNEDLLARIETLQSNAKLLEVQILEVQRAKAMVDKELEAEKLQKEQKIKEHATTVNELEELQVQLQKEKKQLQKTMQELELVKKDAQQTTLMNMEIADYERLMKELNQKLTNKNNKIEDLEQEIKIQKQKQETLQEEITSLQSSVQQYEEKNTKIKQLLVKTKKELADSKQAETDHLILQASLKGELEASQQQVEVYKIQLAEITSEKHKIHEHLKTSAEQHQRTLSAYQQRVTALQEECRAAKAEQATVTSEFESYKVRVHNVLKQQKNKSMSQAETEGAKQEREHLEMLIDQLKIKLQDSQNNLQINVSELQTLQSEHDTLLERHNKMLQETVSKEAELREKLCSIQSENMMMKSEHTQTVSQLTSQNEVLRNSFRDQVRHLQEEHRKTVETLQQQLSKMEAQLFQLKNEPTTRSPVSSQQSLKNLRERRNTDLPLLDMHTVTREEGEGMETTDTESVSSASTYTQSLEQLLNSPETKLEPPLWHAEFTKEELVQKLSSTTKSADHLNGLLRETEATNAILMEQIKLLKSEIRRLERNQEREKSAANLEYLKNVLLQFIFLKPGSERERLLPVINTMLQLSPEEKGKLAAVAQGEEENASRSSGWASYLHSWSGLR

SEQ ID NO: 92 - protein, 1057 aa, Homo sapiens
MLCWGNASFGQLGLGGIDEEIVLEPRKSDFFINKRVRDVGCGLRHTVFVLDDGTVYTCGCNDLGQLGHEKSRKKPEQVVALDAQNIVAVSCGEAHTLALNDKGQVYAWGLDSDGQLGLVGSEECIRVPRNIKSLSDIQIVQVACGYYHSLALSKASEVFCWGQNKYGQLGLGTDCKKQTSPQLLKSLLGIPFMQVAAGGAHSFVLTLSGAIFGWGRNKFGQLGLNDENDRYVPNLLKSLRSQKIVYICCGEDHTAALTKEGGVFTFGAGGYGQLGHNSTSHEINPRKVFELMGSIVTEIACGRQHTSAFVPSSGRIYSFGLGGNGQLGTGSTSNRKSPFTVKGNWYPYNGQCLPDIDSEEYFCVKRIFSGGDQSFSHYSSPQNCGPPDDFRCPNPTKQIWTVNEALIQKWLSYPSGRFPVEIANEIDGTFSSSGCLNGSFLAVSNDDHYRTGTRFSGVDMNAARLLFHKLIQPDHPQISQQVAASLEKNLIPKLTSSLPDVEALRFYLTLPECPLMSDSNNFTTIAIPFGTALVNLEKAPLKVLENWWSVLEPPLFLKIVELFKEVVVHLLKLYKIGIPPSERRIFNSFLHTALKVLEILHRVNEKMGQIIQYDKFYIHEVQELIDIRNDYINWVQQQAYGMDVNHGLTELADIPVTICTYPFVFDAQAKTTLLQTDAVLQMQMAIDQAHRQNVSSLFLPVIESVNPCLILVVRRENIVGDAMEVLRKTKNIDYKKPLKVIFVGEDAVDAGGVRKEFFLLIMRELLDPKYGMFRYYEDSRLIWFSDKTFEDSDLFHLIGVICGLAIYNCTIVDLHFPLALYKKLLKKKPSLDDLKELMPDVGRSMQQLLDYPEDDIEETFCLNFTITVENFGATEVKELVLNGADTAVNKQNRQEFVDAYVDYIFNKSVASLFDAFHAGFHKVCGGKVLLLFQPNELQAMVIGNTNYDWKELEKNTEYKGEYWAEHPTIKIFWEVFHELPLEKKKQFLLFLTGSDRIPILGMKSLKLVIQSTGGGEEYLPVSHTCFNLLDLPKYTEKETLRSKLIQAIDHNEGFSLI

SEQ ID NO: 93 - protein, 3859 aa, Homo sapiens
MAFVATQGATVVDQTTLMKKYLQFVAALTDVNTPDETKLKMMQEVSENFENVTSSPQYSTFLEHIIPRFLTFLQDGEVQFLQEKPAQQLRKLVLEIIHRIPTNEHLRPHTKNVLSVMFRFLETENEENVLICLRIIIELHKQFRPPITQEIHHFLDFVKQIYKELPKVVNRYFENPQVIPENTVPPPEMVGMITTIAVKVNPEREDSETRTHSIIPRGSLSLKVLAELPIIVVLMYQLYKLNIHNVVAEFVPLIMNTIAIQVSAQARQHKLYNKELYADFIAAQIKTLSFLAYIIRIYQELVTKYSQQMVKGMLQLLSNCPAETAHLRKELLIAAKHILTTELRNQFIPCMDKLFDESILIGSGYTARETLRPLAYSTLADLVHHVRQHLPLSDLSLAVQLFAKNIDDESLPSSIQTMSCKLLLNLVDCIRSKSEQESGNGRDVLMRMLEVFVLKFHTIARYQLSAIFKKCKPQSELGAVEAALPGVPTAPAAPGPAPSPAPVPAPPPPPPPPPPATPVTPAPVPPFEKQGEKDKEDKQTFQVTDCRSLVKTLVCGVKTITWGITSCKAPGEAQFIPNKQLQPKETQIYIKLVKYAMQALDIYQVQIAGNGQTYIRVANCQTVRMKEEKEVLEHFAGVFTMMNPLTFKEIFQTTVPYMVERISKNYALQIVANSFLANPTTSALFATILVEYLLDRLPEMGSNVELSNLYLKLFKLVFGSVSLFAAENEQMLKPHLHKIVNSSMELAQTAKEPYNYFLLLRALFRSIGGGSHDLLYQEFLPLLPNLLQGLNMLQSGLHKQHMKDLFVELCLTVPVRLSSLLPYLPMLMDPLVSALNGSQTLVSQGLRTLELCVDNLQPDFLYDHIQPVRAELMQALWRTLRNPADSISHVAYRVLGKFGGSNRKMLKESQKLHYVVTEVQGPSITVEFSDCKASLQLPMEKAIETALDCLKSANTEPYYRRQAWEVIKCFLVAMMSLEDNKHALYQLLAHPNFTEKTIPNVIISHRYKAQDTPARKTFEQALTGAFMSAVIKDLRPSALPFVASLIRHYTMVAVAQQCGPFLLPCYQVGSQPSTAMFHSEENGSKGMDPLVLIDAIAICMAYEEKELCKIGEVALAVIFDVASIILGSKERACQLPLFSYIVERLCACCYEQAWYAKLGGVVSIKFLMERLPLTWVLQNQQTFLKALLFVMMDLTGEVSNGAVAMAKTTLEQLLMRCATPLKDEERAEEIVAAQEKSFHHVTHDLVREVTSPNSTVRKQAMHSLQVLAQVTGKSVTVIMEPHKEVLQDMVPPKKHLLRHQPANAQIGLMEGNTFCTTLQPRLFTMDLNVVEHKVFYTELLNLCEAEDSALTKLPCYKSLPSLVPLRIAALNALAACNYLPQSREKIIAALFKALNSTNSELQEAGEACMRKFLEGATIEVDQIHTHMRPLLMMLGDYRSLTLNVVNRLTSVTRLFPNSFNDKFCDQMMQHLRKWMEVVVITHKGGQRSDGNESISECGRCPLSPFCQFEEMKICSAIINLFHLIPAAPQTLVKPLLEVVMKTERAMLIEAGSPFREPLIKFLTRHPSQTVELFMMEATLNDPQWSRMFMSFLKHKDARPLRDVLAANPNRFITLLLPGGAQTAVRPGSPSTSTMRLDLQFQAIKIISIIVKNDDSWLASQHSLVSQLRRVWVSENFQERHRKENMAATNWKEPKLLAYCLLNYCKRNYGDIELLFQLLRAFTGRFLCNMTFLKEYMEEEIPKNYSIAQKRALFFRFVDFNDPNFGDELKAKVLQHILNPAFLYSFEKGEGEQLLGPPNPEGDNPESITSVFITKVLDPEKQADMLDSLRIYLLQYATLLVEHAPHHIHDNNKNRNSKLRRLMTFAWPCLLSKACVDPACKYSGHLLLAHIIAKFAIHKKIVLQVFHSLLKAHAMEARAIVRQAMAILTPAVPARMEDGHQMLTHWTRKIIVEEGHTVPQLVHILHLIVQHFKVYYPVRHHLVQHMVSAMQRLGFTPSVTIEQRRLAVDLSEVVIKWELQRIKDQQPDSDMDPNSSGEGVNSVSSSIKRGLSVDSAQEVKRFRTATGAISAVFGRSQSLPGADSLLAKPIDKQHTDTVVNFLIRVACQVNDNTNTAGSPGEVLSRRCVNLLKTALRPDMWPKSELKLQWFDKLLMTVEQPNQVNYGNICTGLEVLSFLLTVLQSPAILSSFKPLQRGIAACMTCGNTKVLRAVHSLLSRLMSIFPTEPSTSSVASKYEELECLYAAVGKVIYEGLTNYEKATNANPSQLFGTLMILKSACSNNPSYIDRLISVFMRSLQKMVREHLNPQAASGSTEATSGTSELVMLSLELVKTRLAVMSMEMRKNFIQAILTSLIEKSPDAKILRAVVKIVEEWVKNNSPMAANQTPTLREKSILLVKMMTYIEKRFPEDLELNAQFLDLVNYVYRDETLSGSELTAKLEPAFLSGLRCAQPLIRAKFFEVFDNSMKRRVYERLLYVTCSQNWEAMGNHFWIKQCIELLLAVCEKSTPIGTSCQGAMLPSITNVINLADSHDRAAFAMVTHVKQEPRERENSESKEEDVEIDIELAPGDQTSTPKTKELSEKDIGNQLHMLTNRHDKFLDTLREVKTGALLSAFVQLCHISTTLAEKTWVQLFPRLWKILSDRQQHALAGEISPFLCSGSHQVQRDCQPSALNCFVEAMSQCVPPIPIRPCVLKYLGKTHNLWFRSTLMLEHQAFEKGLSLQIKPKQTTEFYEQESITPPQQEILDSLAELYSLLQEEDMWAGLWQKRCKYSETATAIAYEQHGFFEQAQESYEKAMDKAKKEHERSNASPAIFPEYQLWEDHWIRCSKELNQWEALTEYGQSKGHINPYLVLECAWRVSNWTAMKEALVQVEVSCPKEMAWKVNMYRGYLAICHPEEQQLSFIERLVEMASSLAIREWRRLPHVVSHVHTPLLQAAQQIIELQEAAQINAGLQPTNLGRNNSLHDMKTVVKTWRNRLPIVSDDLSHWSSIFMWRQHHYQGKPTWSGMHSSSIVTAYENSSQHDPSSNNAMLGVHASASAIIQYGKIARKQGLVNVALDILSRIHTIPTVPIVDCFQKIRQQVKCYLQLAGVMGKNECMQGLEVIESTNLKYFTKEMTAEFYALKGMFLAQINKSEEANKAFSAAVQMHDVLVKAWAMWGDYLENIFVKERQLHLGVSAITCYLHACRHQNESKSRKYLAKVLWLLSFDDDKNTLADAVDKYCIGVPPIQWLAWIPQLLTCLVGSEGKLLLNLISQVGRVYPQAVYFPIRTLYLTLKIEQRERYKSDPGPIRATAPMWRCSRIMHMQRELHPTLLSSLEGIVDQMVWFRENWHEEVLRQLQQGLAKCYSVAFEKSGAVSDAKITPHTLNFVKKLVSTFGVGLENVSNVSTMFSSAASESLARRAQATAQDPVFQKLKGQFTTDFDFSVPGSMKLHNLISKLKKWIKILEAKTKQLPKFFLIEEKCRFLSNFSAQTAEVEIPGEFLMPKPTHYYIKIARFMPRVEIVQKHNTAARRLYIRGHNGKIYPYLVMNDACLTESRREERVLQLLRLLNPCLEKRKETTKRHLFFTVPRVVAVSPQMRLVEDNPSSLSLVEIYKQRCAKKGIEHDNPISRYYDRLATVQARGTQASHQVLRDILKEVQSNMVPRSMLKEWALHTFPNATDYWTFRKMFTIQLALIGFAEFVLHLNRLNPEMLQIAQDTGKLNVAYFRFDINDATGDLDANRPVPFRLTPNISEFLTTIGVSGPLTASMIAVARCFAQPNFKVDGILKTVLRDEIIAWHKKTQEDTSSPLSAAGQPENMDSQQLVSLVQKAVTAIMTRLHNLAQFEGGESKVNTLVAAANSLDNLCRMDPAWHPWL

SEQ ID NO: 94 - protein, 1508 aa, Homo sapiens
MFSALKYHAIDYLYENVVRKKFYRDALLLRIPSCLYQDESYHVAVTDNKFRRPWTRVSAVSVPGMTDTSVLDQWKASFFVEDFLEKKTITRMVTQINCEFEEVVPSSNPDSQIEVEEVSLYTHMDYNEVFTPVSCLEKCSALQNQNQDLFIDDKGILFVSSRKHLPTLPTLLSRLKLFLVKDPLLDFKGQIFTEANFSRECFSLQETLEAFVKEDFCMDKVNFCQEKLEDTICLNEPSSFLIEYEFLIPPSLKPEIDIPSLSELKELLNPVPEIINYVDEKEKLFERDLTNKHGIEDIGDIKFSSTEILTIQSQSEPEECSKPGELEMPLTPLFLTCQHSSVNSLRTELQTFPLSPVCKINLLTAEESANEYYMMWQLERCRSPLNPFLLTVPRIQEPHSQYSVTDLKKIFSVKEESLVINLEKAEWWKQAGLNLKMMETLEHLNTYLCHDNLSSNDTKIEIFLPTKVLQLESCLEHKSRSSPIALIDEKSTNAHLSLPQKSPSLAKEVPDLCFSDDYFSDKGAAKEEKPKNDQEPVNRIIQKKENNDHFELDCTGPSIKSPSSSIIKKASFEHGKKQENDLDLLSDFIMLRNKYKTCTSKTEVTNSDEKHDKEACSLTLQEESPIVHINKTLEEINQERGTDSVIEIQASDSQCQAFCLLEAAASPILKNLVSLCTLPTANWKFATVIFDQTRFLLKEQEKVVSDAVRQGTIDEREMTFKHAALLHLLVTIRDVLLTCSLDTALGYLSKAKDIYNSILGPYLGDIWRQLEIVQFIRGKKPETNYKIQELQCQILSWMQSQQQIKVLIIIRMDSDGEKHFLIKILNKIEGLTLTVLHSNERKDFLESEGVLRGTSSCVVVHNQYIGADFPWSNFSFVVEYNYVEDSCWTKHCKELNIPYMAFKVILPDTVLERSTLLDRFGGFLLEIQIPYVFFASEGLLNTPDILQLLESNYNISLVERGCSESLKLFGSSECYVVVTIDEHTAIILQDLEELNCEKASDNIIMRLMALSLQYRYCWIILYTKETLNSEYPLTEKTLHHLALIYAALVSFGLNSEELDVKLIIAPGVEATALIIRQIADHSLMTSKRDPHEWLDKSWLKVSPSEEEMYLLDFPCINPLVAQLMLNKGPSLHWILLATLCQLQELLPEVPEKVLKHFCSITSLFKIGSSSITKSPQISSPQENRNQISTLSSQSSASDLDSVIQEHNEYYQYLGLGETVQEDKTTTLNDNSSIMELKGISSFLPPVTSYNQTSYWKDSSCKSNIGQNTPFLINIESRRPAYNSFLNHSDSESDVFSLGLTQMNCETIKSPTDTQKRVSVVPRFINSQKRRTHEAKGFINKDVSDPIFSLEGTQSPLHWNFKKNIWEQENHPFNLQYGAQQTACNKLYSQKGNLFTDQQKCLSDESEGLTCESSKDETFWRELPSVPSLDLFRASDSNANQKEFNSLYFYQRAGKSLGQKRHHESSFNSGDKESLTGFMCSQLPQFKKRRLAYEKVPGRVDGQTRLRFF

SEQ ID NO: 95 - protein, 583 aa, Homo sapiens
MALKKSSPSLDSGDSDSEELPTFAFLKKEPSSTKRRQPEREEKIVVVDISDCEASCPPAPELFSPPVPEIAETVTQTQPVRLLSSESEDEEEFIPLAQRLTCKFLTHKQLSPEDSSSPVKSVLDHQNNEGASCDWKKPFPKIPEVPLHDTPERSAADNKDLILDPCCQLPAYLSTCPGQSSSLAVTKTNSDILPPQKKTKPSQKVQGRGSHGCRQQRQARQKESTLRRQERKNAALVTRMKAQRPEECLKHIIVVLDPVLLQMEGGGQLLGALQTMECRCVIEAQAVPCSVTWRRRAGPSEDREDWVEEPTVLVLLRAEAFVSMIDNGKQGSLDSTMKGKETLQGFVTDITAKTAGKALSLVIVDQEKCFSLELLFFDFLPCTSAQNPPRRGKQGANKQTKKQQQRQPEASIGSMVSRVDAEEALVDLQLHTEAQAQIVQSWKELADFTCAFTKAVAEAPFKKLRDETTFSFCLESDWAGGVKVDLAGRGLALVWRRQIQQLNRVSLEMASAVVNAYPSPQLLVQAYQQCFSDKERQNLLADIQVRRGEGVTSTSRRIGPELSRRIYLQMTTLQPHLSLDSAD

SEQ ID NO: 96 - protein, 8749 aa, Homo sapiens
MATSRGASRCPRDIANVMQRLQDEQEIVQKRTFTKWINSHLAKRKPPMVVDDLFEDMKDGVKLLALLEVLSGQKLPCEQGRRMKRIHAVANIGTALKFLEGRKSMHRGSPIKLVNINSTDIADGRPSIVLGLMWTIILYFQIEELTSNLPQLQSLSSSASSVDSIVSSETPSPPSKRKVTTKIQGNAKKALLKWVQYTAGKQTGIEVKDFGKSWRSGVAFHSVIHAIRPELVDLETVKGRSNRENLEDAFTIAETELGIPRLLDPEDVDVDKPDEKSIMTYVAQFLKHYPDIHNASTDGQEDDEILPGFPSFANSVQNFKREDRVIFKEMKVWIEQFERDLTRAQMVESNLQDKYQSFKHFRVQYEMKRKQIEHLIQPLHRDGKLSLDQALVKQSWDRVTSRLFDWHIQLDKSLPAPLGTIGAWLYRAEVALREEITVQQVHEETANTIQRKLEQHKDLLQNTDAHKRAFHEIYRTRSVNGIPVPPDQLEDMAERFHFVSSTSELHLMKMEFLELKYRLLSLLVLAESKLKSWIIKYGRRESVEQLLQNYVSFIENSKFFEQYEVTYQILKQTAEMYVKADGSVEEAENVMKFMNETTAQWRNLSVEVRSVRSMLEEVISNWDRYGNTVASLQAWLEDAEKMLNQSENAKKDFFRNLPHWIQQHTAMNDAGNFLIETCDEMVSRDLKQQLLLLNGRWRELFMEVKQYAQADEMDRMKKEYTDCVVTLSAFATEAHKKLSEPLEVSFMNVKLLIQDLEDIEQRVPVMDAQYKIITKTAHLITKESPQEEGKEMFATMSKLKEQLTKVKECYSPLLYESQQLLIPLEELEKQMTSFYDSLGKINEIITVLEREAQSSALFKQKHQELLACQENCKKTLTLIEKGSQSVQKFVTLSNVLKHFDQTRLQRQIADIHVAFQSMVKKTGDWKKHVETNSRLMKKFEESRAELEKVLRIAQEGLEEKGDPEELLRRHTEFFSQLDQRVLNAFLKACDELTDILPEQEQQGLQEAVRKLHKQWKDLQGEAPYHLLHLKIDVEKNRFLASVEECRTELDRETKLMPQEGSEKIIKEHRVFFSDKGPHHLCEKRLQLIEELCVKLPVRDPVRDTPGTCHVTLKELRAAIDSTYRKLMEDPDKWKDYTSRFSEFSSWISTNETQLKGIKGEAIDTANHGEVKRAVEEIRNGVTKRGETLSWLKSRLKVLTEVSSENEAQKQGDELAKLSSSFKALVTLLSEVEKMLSNFGDCVQYKEIVKNSLEELISGSKEVQEQAEKILDTENLFEAQQLLLHHQQKTKRISAKKRDVQQQIAQAQQGEGGLPDRGHEELRKLESTLDGLERSRERQERRIQVTLRKWERFETNKETVVRYLFQTGSSHERFLSFSSLESLSSELEQTKEFSKRTESIAVQAENLVKEASEIPLGPQNKQLLQQQAKSIKEQVKKLEDTLEEDIKTMEMVKTKWDHFGSNFETLSVWITEKEKELNALETSSSAMDMQISQIKVTIQEIESKLSSIVGLEEEAQSFAQFVTTGESARIKAKLTQIRRYGEELREHAQCLEGTILGHLSQQQKFEENLRKIQQSVSEFEDKLAVPIKICSSATETYKVLQEHMDLCQALESLSSAITAFSASARKVVNRDSCVQEAAALQQQYEDILRRAKERQTALENLLAHWQRLEKELSSFLTWLERGEAKASSPEMDISADRVKVEGELQLIQALQNEVVSQASFYSKLLQLKESLFSVASKDDVKMMKLHLEQLDERWRDLPQIINKRINFLQSVVAEHQQFDELLLSFSVWIKLFLSELQTTSEISIMDHQVALTRHKDHAAEVESKKGELQSLQGHLAKLGSLGRAEDLHLLQGKAEDCFQLFEEASQVVERRQLALSHLAEFLQSHASLSGILRQLRQTVEATNSMNKNESDLIEKDLNDALQNAKALESAAVSLDGILSKAQYHLKIGSSEQRTSCRATADQLCGEVERIQNLLGTKQSEADALAVLKKAFQDQKEELLKSIEDIEERTDKERLKEPTRQALQQRLRVFNQLEDELNSHEHELCWLKDKAKQIAQKDVAFAPEVDREINRLEVTWDDTKRLIHENQGQCCGLIDLMREYQNLKSAVSKVLENASSVIVTRTTIKDQEDLKWAFSKHETAKNKMNYKQKDLDNFTSKGKHLLSELKKIHSSDFSLVKTDMESTVDKWLDVSEKLEENMDRLRVSLSIWDDVLSTRDEIEGWSNNCVPQMAENISNLDNHLRAEELLKEFESEVKNKALRLEELHSKVNDLKELTKNLETPPDLQFIEADLMQKLEHAKEITEVAKGTLKDFTAQSTQVEKFINDITTWFTKVEESLMNCAQNETCEALKKVKDIQKELQSQQSNISSTQENLNSLCRKYHSAELESLGRAMTGLIKKHEAVSQLCSKTQASLQESLEKHFSESMQEFQEWFLGAKAAAKESSDRTGDSKVLEAKLHDLQNILDSVSDGQSKLDAVTQEGQTLYAHLSKQIVSSIQEQITKANEEFQAFLKQCLKDKQALQDCASELGSFEDQHRKLNLWIHEMEERFNTENLGESKQHIPEKKNEVHKVEMFLGELLAARESLDKLSQRGQLLSEEGHGAGQEGRLCSQLLTSHQNLLRMTKEKLRSCQVALQEHEALEEALQSMWFWVKAIQDRLACAESTLGSKDTLEKRLSQIQDILLMKGEGEVKLNMAIGKGEQALRSSNKEGQRVIQTQLETLKEVWADIMSSSVHAQSTLESVISQWNDYVERKNQLEQWMESVDQKIEHPLQPQPGLKEKFVLLDHLQSILSEAEDHTRALHRLIAKSRELYEKTEDESFKDTAQEELKTQFNDIMTVAKEKMRKVEEIVKDHLMYLDAVHEFTDWLHSAKEELHRWSDMSGDSSATQKKLSKIKELIDSREIGASRLSRVESLAPEVKQNTTASGCELMHTEMQALRADWKQWEDSVFQTQSCLENLVSQMALSEQEFSGQVAQLEQALEQFSALLKTWAQQLTLLEGKNTDEEIVECWHKGQEILDALQKAEPRTEDLKSQLNELCRFSRDLSTYSGKVSGLIKEYNCLCLQASKGCQNKEQILQQRFRKAFRDFQQWLVNAKITTAKCFDIPQNISEVSTSLQKIQEFLSESENGQHKLNMMLSKGELLSTLLTKEKAKGIQAKVTAAKEDWKNFHSNLHQKESALENLKIQMKDFEVSAEPIQDWLSKTEKMVHESSNRLYDLPAKRREQQKLQSVLEEIHCYEPQLNRLKEKAQQLWEGQAASKSFRHRVSQLSSQYLALSNLTKEKVSRLDRIVAEHNQFSLGIKELQDWMTDAIHMLDSYCHPTSDKSVLDSRTLKLEALLSVKQEKEIQMKMIVTRGESVLQNTSPEGIPTIQQQLQSVKDMWASLLSAGIRCKSQLEGALSKWTSYQDGVRQFSGWMDSMEANLNESERQHAELRDKTTMLGKAKLLNEEVLSYSSLLETIEVKGAGMTEHYVTQLELQDLQERYRAIQERAKEAVTKSEKLVRLHQEYQRDLKAFEVWLGQEQEKLDQYSVLEGDAHTHETTLRDLQELQVHCAEGQALLNSVLHTREDVIPSGIPQAEDRALESLRQDWQAYQHRLSETRTQFNNVVNKLRLMEQKFQQVDEWLKTAEEKKWHEEVTAYRDEVEEVGARAQEILDESHVNSRMGCQATQLTSRYQALLLQVLEQIKFLEEEIQSLEESESSLSSYSDWYGSTHKNFKNVATKIDKVDTVMMGKKLKTLEVLLKDMEKGHSLLKSAREKGERAVKYLEEGEAERLRKEIHDHMEQLKELTSTVRKEHMTLEKGLHLAKEFSDKCKALTQWIAEYQEILHVPEEPKMELYEKKAQLSKYKSLQQTVLSHEPSVKSVREKGEALLELVQDVTLKDKIDQLQSDYQDLCSIGKAMMEEIAGFEDRLNNLQMKGDTLIGQCADHLQAKLKQNVHAHLQGTKDSYSAICSTAQRMYQSLEHELQKHVSRQDTLQQCQAWLSAVQPDLEPSPQPPLSRAEAIKQVKHFRALQEQARTYLDLLCSMCDLSNASVKTTAKDIQQTEQTIEQKLVQAQNLTQGWEEIKHLKSELWIYLQDADQQLQNMKRRHSELELNIAQNMVSQVKDFVKKLQSKQASVNTIIEKVNKLTKKEESPEHKEINHLNDQWLDLCRQSNNLCLQREEDLQRTRDYHDCMNVVEVFLEKFTTEWDNLARSDAESTAVHLEALKKLALALQERKYAIEDLKDQKQKMIEHLNLDDKELVKEQTSHLEQRWFQLEDLIKRKIQVSVTNLEELNVVQSRFQELMEWAEEQQPNIAEALKQSPPPDMAQNLLMDHLAICSELEAKQMLLKSLIKDADRVMADLGLNERQVIQKALSDAQSHVNCLSDLVGQRRKYLNKALSEKTQFLMAVFQATSQIQQHERKIMFREHICLLPDDVSKQVKTCKSAQASLKTYQNEVTGLWAQGRELMKEVTEQEKSEVLGKLQELQSVYDSVLQKCSHRLQELEKNLVSRKHFKEDFDKACHWLKQADIVTFPEINLMNESSELHTQLAKYQNILEQSPEYENLLLTLQRTGQTILPSLNEVDHSYLSEKLNALPRQFNVIVALAKDKFYKVQEAILARKEYASLIELTTQSLSELEAQFLRMSKVPTDLAVEEALSLQDGCRAILDEVAGLGEAVDELNQKKEGFRSTGQPWQPDKMLHLVTLYHRLKRQTEQRVSLLEDTTSAYQEHEKMCQQLERQLKSVKEEQSKVNEETLPAEEKLKMYHSLAGSLQDSGIVLKRVTIHLEDLAPHLDPLAYEKARHQIQSWQGELKLLTSAIGETVTECESRMVQSIDFQTEMSRSLDWLRRVKAELSGPVYLDLNLQDIQEEIRKIQIHQEEVQSSLRIMNALSHKEKEKFTKAKELISADLEHSLAELSELDGDIQEALRTRQATLTEIYSQCQRYYQVFQAANDWLEDAQELLQLAGNGLDVESAEENLKSHMEFFSTEDQFHSNLEELHSLVATLDPLIKPTGKEDLEQKVASLELRSQRMSRDSGAQVDLLQRCTAQWHDYQKAREEVIELMNDTEKKLSEFSLLKTSSSHEAEEKLSEHKALVSVVNSFHEKIVALEEKASQLEKTGNDASKATLSRSMTTVWQRWTRLRAVAQDQEKILEDAVDEWTGFNNKVKKATEMIDQLQDKLPGSSAEKASKAELLTLLEYHDTFVLELEQQQSALGMLRQQTLSMLQDGAAPTPGEEPPLMQEITAMQDRCLNMQEKVKTNGKLVKQELKDREMVETQINSVKCWVQETKEYLGNPTIEIDAQLEELQILLTEATNHRQNIEKMAEEQKEKYLGLYTILPSELSLQLAEVALDLKIRDQIQDKIKEVEQSKATSQELSRQIQKLAKDLTTILTKLKAKTDNVVQAKTDQKVLGEELDGCNSKLMELDAAVQKFLEQNGQLGKPLAKKIGKLTELHQQTIRQAENRLSKLNQAASHLEEYNEMLELILKWIEKAKVLAHGTIAWNSASQLREQYILHQTLLEESKEIDSELEAMTEKLQYLTSVYCTEKMSQQVAELGRETEELRQMIKIRLQNLQDAAKDMKKFEAELKKLQAALEQAQATLTSPEVGRLSLKEQLSHRQHLLSEMESLKPKVQAVQLCQSALRIPEDVVASLPLCHAALRLQEEASRLQHTAIQQCNIMQAAVVQYEQYEQEMKHLQQLIEGAHREIEDKPVATSNIQELQAQISRHEELAQKIKGYQEQIASLNSKCKMLTMKAKHATMLLTVTEVEGLAEGTEDLDGELLPTPSAHPSVVMMTAGRCHTLLSPVTEESGEEGTNSEISSPPACRSPSPVANTDASVNQDIAYYQALSAERLQTDAAKIHPSTSASQEFYEPGLEPSATAKLGDLQRSWETLKNVISEKQRTLYEALERQQKYQDSLQSISTKMEAIELKLSESPEPGRSPESQMAEHQALMDEILMLQDEINELQSSLAEELVSESCEADPAEQLALQSTLTVLAERMSTIRMKASGKRQLLEEKLNDQLEEQRQEQALQRYRCEADELDSWLLSTKATLDTALSPPKEPMDMEAQLMDCQNMLVEIEQKVVALSELSVHNENLLLEGKAHTKDEAEQLAGKLRRLKGSLLELQRALHDKQLNMQGTAQEKEESDVDLTATQSPGVQEWLAQARTTWTQQRQSSLQQQKELEQELAEQKSLLRSVASRGEEILIQHSAAETSGDAGEKPDVLSQELGMEGEKSSAEDQMRMKWESLHQEFSTKQKLLQNVLEQEQEQVLYSRPNRLLSGVPLYKGDVPTQDKSAVTSLLDGLNQAFEEVSSQSGGAKRQSIHLEQKLYDGVSATSTWLDDVEERLFVATALLPEETETCLFNQEILAKDIKEMSEEMDKNKNLFSQAFPENGDNRDVIEDTLGCLLGRLSLLDSVVNQRCHQMKERLQQILNFQNDLKVLFTSLADNKYIILQKLANVFEQPVAEQIEAIQQAEDGLKEFDAGIIELKRRGDKLQVEQPSMQELSKLQDMYDELMMIIGSRRSGLNQNLTLKSQYERALQDLADLLETGQEKMAGDQKIIVSSKEEIQQLLDKHKEYFQGLESHMILTETLFRKIISFAVQKETQFHTELMAQASAVLKRAHKRGVELEYILETWSHLDEDQQELSRQLEVVESSIPSVGLVEENEDRLIDRITLYQHLKSSLNEYQPKLYQVLDDGKRLLISISCSDLESQLNQLGECWLSNTNKMSKELHRLETILKHWTRYQSESADLIHWLQSAKDRLEFWTQQSVTVPQELEMVRDHLNAFLEFSKEVDAQSSLKSSVLSTGNQLLRLKKVDTATLRSELSRIDSQWTDLLTNIPAVQEKLHQLQMDKLPSRHAISEVMSWISLMENVIQKDEDNIKNSIGYKAIHEYLQKYKGFKIDINCKQLTVDFVNQSVLQISSQDVESKRSDKTDFAEQLGAMNKSWQILQGLVTEKIQLLEGLLESWSEYENNVQCLKTWFETQEKRLKQQHRIGDQASVQNALKDCQDLEDLIKAKEKEVEKIEQNGLALIQNKKEDVSSIVMSTLRELGQTWANLDHMVGQLKILLKSVLDQWSSHKVAFDKINSYLMEARYSLSRFRLLTGSLEAVQVQVDNLQNLQDDLEKQERSLQKFGSITNQLLKECHPPVTETLTNTLKEVNMRWNNLLEEIAEQLQSSKALLQLWQRYKDYSKQCASTVQQQEDRTNELLKAATNKDIADDEVATWIQDCNDLLKGLGTVKDSLFFLHELGEQLKQQVDASAASAIQSDQLSLSQHLCALEQALCKQQTSLQAGVLDYETFAKSLEALEAWIVEAEEILQGQDPSHSSDLSTIQERMEELKGQMLKFSSMAPDLDRLNELGYRLPLNDKEIKRMQNLNRHWSLISSQTTERFSKLQSFLLQHQTFLEKCETWMEFLVQTEQKLAVEISGNYQHLLEQQRAHELFQAEMFSRQQILHSIIIDGQRLLEQGQVDDRDEFNLKLTLLSNQWQGVIRRAQQRRGIIDSQIRQWQRYREMAEKLRKWLVEVSYLPMSGLGSVPIPLQQARTLFDEVQFKEKVFLRQQGSYILTVEAGKQLLLSADSGAEAALQAELAEIQEKWKSASMRLEEQKKKLAFLLKDWEKCEKGIADSLEKLRTFKKKLSQSLPDHHEELHAEQMRCKELENAVGSWTDDLTQLSLLKDTLSAYISADDISILNERVELLQRQWEELCHQLSLRRQQIGERLNEWAVFSEKNKELCEWLTQMESKVSQNGDILIEEMIEKLKKDYQEEIAIAQENKIQLQQMGERLAKASHESKASEIEYKLGKVNDRWQHLLDLIAARVKKLKETLVAVQQLDKNMSSLRTWLAHIESELAKPIVYDSCNSEEIQRKLNEQQELQRDIEKHSTGVASVLNLCEVLLHDCDACATDAECDSIQQATRNLDRRWRNICAMSMERRLKIEETWRLWQKFLDDYSRFEDWLKSSERTAAFPSSSGVIYTVAKEELKKFEAFQRQVHECLTQLELINKQYRRLARENRTDSACSLKQMVHEGNQRWDNLQKRVTSILRRLKHFIGQREEFETARDSILVWLTEMDLQLTNIEHFSECDVQAKIKQLKAFQQEISLNHNKIEQIIAQGEQLIEKSEPLDAAIIEEELDELRRYCQEVFGRVERYHKKLIRLPLPDDEHDLSDRELELEDSAALSDLHWHDRSADSLLSPQPSSNLSLSLAQPLRSERSGRDTPASVDSIPLEWDHDYDLSRDLESAMSRALPSEDEEGQDDKDFYLRGAVALSDVMIPESPEAYVKLTENAIKNTSGDHSALESQIRQLGKALDDSRFQIQQTENIIRSKTPTGPELDTSYKGYMKLLGECSSSIDSVKRLEHKLKEEEESLPGFVNLHSTETQTAGVIDRWELLQAQALSKELRMKQNLQKWQQFNSDLNSIWAWLGDTEEELEQLQRLELSTDIQTIELQIKKLKELQKAVDHRKAIILSINLCSPEFTQADSKESRDLQDRLSQMNGRWDRVCSLLEEWRGLLQDALMQCQGFHEMSHGLLLMLENIDRRKNEIVPIDSNLDAEILQDHHKQLMQIKHELLESQLRVASLQDMSCQLLVNAEGTDCLEAKEKVHVIGNRLKLLLKEVSRHIKELEKLLDVSSSQQDLSSWSSADELDTSGSVSPTSGRSTPNRQKTPRGKCSLSQPGPSVSSPHSRSTKGGSDSSLSEPGPGRSGRGFLFRVLRAALPLQLLLLLLIGLACLVPMSEEDYSCALSNNFARSFHPMLRYTNGPPPL

SEQ ID NO: 97 - protein, 299 aa, Homo sapiens
MGTKAQVERKLLCLFILAILLCSLALGSVTVHSSEPEVRIPENNPVKLSCAYSGFSSPRVEWKFDQGDTTRLVCYNNKITASYEDRVTFLPTGITFKSVTREDTGTYTCMVSEEGGNSYGEVKVKLIVLVPPSKPTVNIPSSATIGNRAVLTCSEQDGSPPSEYTWFKDGIVMPTNPKSTRAFSNSSYVLNPTTGELVFDPLSASDTGEYSCEARNGYGTPMTSNAVRMEAVERNVGVIVAAVLVTLILLGILVFGIWFAYSRGHFDRTKKGTSSKKVIYSQPSARSEGEFKQTSSFLV

SEQ ID NO: 98 - protein, 2448 aa, Homo sapiens
MSVGRRKLALLWALALALACTRHTGHAQDGSSESSYKHHPALSPIARGPSGVPLRGATVFPSLRTIPVVRASNPAHNGRVCSTWGSFHYKTFDGDVFRFPGLCNYVFSEHCGAAYEDFNIQLRRSQESAAPTLSRVLMKVDGVVIQLTKGSVLVNGHPVLLPFSQSGVLIQQSSSYTKVEARLGLVLMWNHDDSLLLELDTKYANKTCGLCGDFNGMPVVSELLSHNTKLTPMEFGNLQKMDDPTEQCQDPVPEPPRNCSTGFGICEELLHGQLFSGCVALVDVGSYLEACRQDLCFCEDTDLLSCVCHTLAEYSRQCTHAGGLPQDWRGPDFCPQKCPNNMQYHECRSPCADTCSNQEHSRACEDHCVAGCFCPEGTVLDDIGQTGCVPVSKCACVYNGAAYAPGATYSTDCTNCTCSGGRWSCQEVPCPDTCSVLGGAHFSTFDGKQYTVHGDCSYVLTKPCDSSAFTVLAELRRCGLTDSETCLKSVTLSLDGAQTVVVIKASGEVFLNQIYTQLPISAANVTIFRPSTFFIIAQTSLGLQLNLQPVPTMQLFMQLAPKLRGQTCGLCGNFNSIQADDFRTLSGVVEATAAAFFNTFKTQAACPNIRNSFEDPCSLSVENEKYAQHWCSQLTDADGPFGRCHAAVKPGTYYSNCVFDTCNCERSEDCLCAALSSYVHACAAKGVQLGGWRDGVCTKPMTTCPKSMTYHYHVSTCQPTCRSLSEGDITCSVGFIPVDGCICPKGTFLDDTGKCVQASNCPCYHRGSMIPNGESVHDSGAICTCTHGKLSCIGGQAPAPVCAAPMVFFDCRNATPGDTGAGCQKSCHTLDMTCYSPQCVPGCVCPDGLVADGEGGCITAEDCPCVHNEASYRAGQTIRVGCNTCTCDSRMWRCTDDPCLATCAVYGDGHYLTFDGQSYSFNGDCEYTLVQNHCGGKDSTQDSFRVVTENVPCGTTGTTCSKAIKIFLGGFELKLSHGKVEVIGTDESQEVPYTIQQMGIYLVVDTDIGLVLLWDKKTSIFINLSPEFKGRVCGLCGNFDDIAVNDFATRSRSVVGDVLEFGNSWKLSPSCPDALAPKDPCTANPFRKSWAQKQCSILHGPTFAACHAHVEPARYYEACVNDACACDSGGDCECFCTAVAAYAQACHEVGLCVCLRTPSICPLFCDYYNPEGQCEWHYQPCGVPCLRTCRNPRGDCLRDVRGLEGCYPKCPPEAPIFDEDKMQCVATCPTPPLPPRCHVHGKSYRPGAVVPSDKNCQSCLCTERGVECTYKAEACVCTYNGQRFHPGDVIYHTTDGTGGCISARCGANGTIERRVYPCSPTTPVPPTTFSFSTPPLVVSSTHTPSNGPSSAHTGPPSSAWPTTAGTSPRTRLPTASASLPPVCGEKCLWSPWMDVSRPGRGTDSGDFDTLENLRAHGYRVCESPRSVECRAEDAPGVPLRALGQRVQCSPDVGLTCRNREQASGLCYNYQIRVQCCTPLPCSTSSSPAQTTPPTTSKTTETRASGSSAPSSTPGTVSLSTARTTPAPGTATSVKKTFSTPSPPPVPATSTSSMSTTAPGTSVVSSKPTPTEPSTSSCLQELCTWTEWIDGSYPAPGINGGDFDTFQNLRDEGYTFCESPRSVQCRAESFPNTPLADLGQDVICSHTEGLICLNKNQLPPICYNYEIRIQCCETVNVCRDITRLPKTVATTRPTPHPTGAQTQTTFTTHMPSASTEQPTATSRGGPTATSVTQGTHTTLVTRNCHPRCTWTKWFDVDFPSPGPHGGDKETYNNIIRSGEKICRRPEEITRVQCRAKSHPEVSIEHLGQVVQCSREEGLVCRNQDQQGPFKMCLNYEVRVLCCETPRGCHMTSTPGSTSSSPAQTTPSTTSKTTEIQASGSSAPSSTPGTVSLSTARTTPAPGTATSVKKTFSTPSPPPVPATSTSSMSTTAPGTSVVSSKPTPTEPSTSSCLQELCTWTEWIDGSYPAPGINGGDFDTFQNLRDEGYTFCESPRSVQCRAESFPNTPLGRLGQDVICSHTEGLICLNKNQLPPICYNYEIRIQCCETVNVCRDITRPPKTVATTRPTPHPTGAQTQTTFTTHMPSASTEQPTATSRGGPTATSVTQGTHTTPVTRNCHPRCTWTTWFDVDFPSPGPHGGDKETYNNIIRSGEKICRRPEEITRLQCRAKSHPEVSIEHLGQVVQCSREEGLVCRNQDQQGPFKMCLNIEVRVLCCETPKGCPVTSTPVTAPSTPSGRAISPTQSTSSWQKSRTTTLVTTSTTSTPQTSTTYAHTTSTTSAPTARTTSAPTTSTTSVPTTSTISGPKTTPSPVPTTSTTSAATTSTISAPTTSTTSVPGTTPSPVLTTSTTSAPTTRTTSASPAGTTSGPGNTPSPVPTTSTISAPTTSITSAPTTSTTSAPTSSTTSGPGTTPSPVPTTSITSAPTTSTTSAPTTSTTSAPTTSTTSAP

SEQ ID NO: 99 - protein, 890 aa, Homo sapiens
MEGGGKPNSSSNSRDDGNSVFPAKASATGAGPAAAEKRLGTPPGGGGAGAKEHGNSVCFKVDGGGGGGGGGGGGEEPAGGFEDAEGPRRQYGFMQRQFTSMLQPGVNKFSLRMFGSQKAVEKEQERVKTAGFWIIHPYSDFRFYWDLIMLIMMVGNLVIIPVGITFFTEQTTTPWIIFNVASDTVFLLDLIMNFRTGTVNEDSSEIILDPKVIKMNYLKSWFVVDFISSIPVDYIFLIVEKGMDSEVYKTARALRIVRFTKILSLLRLLRLSRLIRYIHQWEEIFHMTYDLASAVVRIFNLIGMMLLLCHWDGCLQFLVPLLQDFPPDCWVSLNEMVNDSWGKQYSYALFKAMSHMLCIGYGAQAPVSMSDLWITMLSMIVGATCYAMFVGHATALIQSLDSSRRQYQEKYKQVEQYMSFHKLPADMRQKIHDYYEHRYQGKIFDEENILNELNDPLREEIVNFNCRKLVATMPLFANADPNFVTAMLSKLRFEVFQPGDYIIREGAVGKKMYFIQHGVAGVITKSSKEMKLTDGSYFGEICLLTKGRRTASVRADTYCRLYSLSVDNFNEVLEEYPMMRRAFETVAIDRLDRIGKKNSILLQKFQKDLNTGVFNNQENEILKQIVKHDREMVQAIAPINYPQMTTLNSTSSTTTPTSRMRTQSPPVYTATSLSHSNLHSPSPSTQTPQPSAILSPCSYTTAVCSPPVQSPLAARTFHYASPTASQLSLMQQQPQQQVQQSQPPQTQPQQPSPQPQTPGSSTPKNEVHKSTQALHNTNLTREVRPFSAWQPSLPHEVSTLISRPHPTVGESLASIPQPVTAVPGTGLQAGGRSTVPQRVTLFRQMSSGAIPPNRGVPPAPPPPAAALPRESSSVLNTDPDAEKPRFASNL

SEQ ID NO: 100 - protein, 3925 aa, Homo sapiens
GNEVSLEGGAGDGPLPPGGAGPGPGPGPGPGAGKPPSAPAGGGQLPAAGAARSTAVPPVPGPGPGPGPGPGPGSTSRRLDPKEPLGNQRAASPTPKQASATTPGHESPRETRAQGPAGQEADGPRRTLQVDSRTQRSGRSPSVSPDRGSTPTSPYSVPQIAPLPSSTLCPICKTSDLTSTPSQPNFNTCTQCHNKVCNQCGFNPNPHLTQVKEWLCLNCQMQRALGMDMTTAPRSKSQQQLHSPALSPAHSPAKQPLGKPDQERSRGPGGPQPGSRQAETARATSVPGPAQAAAPPEVGRVSPQPPQPTKPSTAEPRPPAGEAPAKSATAVPAGLGATEQTQEGLTGKLFGLGASLLTQASTLMSVQPEADTQGQPAPSKGTPKIVFNDASKEAGPKPLGSGPGPGPAPGAKTEPGARMGPGSGPGALPKTGGTTSPKHGRAEHQAASKAAAKPKTMPKERAICPLCQAELNVGSKSPANYNTCTTCRLQVCNLCGFNPTPHLVEKTEWLCLNCQTKRLLEGSLGEPTPLPPPTSQQPPVGAPHRASGTSPLKQKGPQGLGQPSGPLPAKASPLSTKASPLPSKASPQAKPLRASEPSKTPSSVQEKKTRVPTKAEPMPKPPPETTPTPATPKVKSGVRRAEPATPVVKAVPEAPKGGEAEDLVGKPYSQDASRSPQSLSDTGYSSDGISSSQSEITGVVQQEVEQLDSAGVTGPHPPSPSEIHKVGSSMRPLLQAQGLAPSERSKPLSSGTGEEQKQRPHSLSITPEAFDSDEELEDILEEDEDSAEWRRRREQQDTAESSDDFGSQLRHDYVEDSSEGGLSPLPPQPPARAAELTDEDFMRRQILEMSAEEDNLEEDDTATSGRGLAKHGTQKGGPRPRPEPSQEPAALPKRRLPHNATTGYEELLPEGGSAEATDGSGTLQGGLRRFKTIELNSTGSYGHELDLGQGPDPSLDREPELEMESLTGSPEDRSRGEHSSTLPASTPSYTSGTSPTSLSSLEEDSDSSPSRRQRLEEAKQQRKARHRSHGPLLPTIEDSSEEEELREEEELLREQEKMREVEQQRIRSTARKTRRDKEELRAQRRRERSKTPPSNLSPIEDASPTEELRQAAEMEELHRSSCSEYSPSPSLDSEAEALDGGPSRLYKSGSEYNLPTFMSLYSPTETPSGSSTTPSSGRPLKSAEEAYEEMMRKAELLQRQQGQAAGARGPHGGPSQPTGPRGLGSFEYQDTTDREYGQAAQPAAEGTPASLGAAVYEEILQTSQSIVRMRQASSRDLAFAEDKKKEKQFLNAESAYMDPMKQNGGPLTPGTSPTQLAAPVSFSTPTSSDSSGGRVIPDVRVTQHFAKETQDPLKLHSSPASPSSASKEIGMPFSQGPGTPATTAVAPCPAGLPRGYMTPASPAGSERSPSPSSTAHSYGHSPTTANYGSQTEDLPQAPSGLAAAGRAAREKPLSASDGEGGTPQPSRAYSYFASSSPPLSPSSPSESPTFSPGKMGPRATAEFSTQTPSPAPASDMPRSPGAPTPSPMVAQGTQTPHRPSTPRLVWQESSQEAPFMVITLASDASSQTRMVHASASTSPLCSPTETQPTTHGYSQTTPPSVSQLPPEPPGPPGFPRVPSAGADGPLALYGWGALPAENISLCRISSVPGTSRVEPGPRTPGTAVVDLRTAVKPTPIILTDQGMDLTSLAVEARKYGLALDPIPGRQSTAVQPLVINLNAQEHTFLATATTVSITMASSVFMAQQKQPVVYGDPYQSRLDFGQGGGSPVCLAQVKQVEQAVQTAPYRSGPRGRPREAKFARYNLPNQVAPLARRDVLITQMGTAQSIGLKPGPVPEPGAEPHRATPAELRSHALPGARKPHTVVVQMGEGTAGTVTTLLPEEPAGALDLTGMRPESQLACCDMVYKLPFGSSCTGTFHPAPSVPEKSMADAAPPGQSSSPFYGPRDPEPPEPPTYRAQGVVGPGPHEEQRPYPQGLPGRLYSSMSDTNLAEAGLNYHAQRIGQLFQGPGRDSAMDLSSLKHSYSLGFADGRYLGQGLQYGSVTDLRHPTDLLAHPLPMRRYSSVSNIYSDHRYGPRGDAVGFQEASLAQYSATTAREISRMCAALNSMDQYGGRHGSGGGGPDLVQYQPQHGPGLSAPQSLVPLRPGLLGNPTFPEGHPSPGNLAQYGPAAGQGTAVRQLLPSTATVRAADGMIYSTINTPIAATLPITTQPASVLRPMVRGGMYRPYASGGITAVPLTSLTRVPMIAPRVPLGPTGLYRYPAPSRFPIASSVPPAEGPVYLGKPAAAKAPGAGGPSRPEMPVGAAREEPLPTTTPAAIKEAAGAPAPAPLAGQKPPADAAPGGGSGALSRPGFEKEEASQEERQRKQQEQLLQLERERVELEKLRQLRLQEELERERVELQRHREEEQLLVQRELQELQTIKHHVLQQQQEERQAQFALQREQLAQQRLQLEQIQQLQQQLQQQLEEQKQRQKAPFPAACEAPGRGPPLAAAELAQNGQYWPPLTHAAFIAMAGPEGLGQPREPVLHRGLPSSASDMSLQTEEQWEASRSGIKKRHSMPRLRDACELESGTEPCVVRRIADSSVQTDDEDGESRYLLSRRRRARRSADCSVQTDDEDSAEWEQPVRRRRSRLPRHSDSGSDSKHDATASSSSAAATVRAMSSVGIQTISDCSVQTEPDQLPRVSPAIHITAATDPKVEIVRYISAPEKTGRGESLACQTEPDGQAQGVAGPQLVGPTAISPYLPGIQIVTPGPLGRFEKKKPDPLEIGYQAHLPPESLSQLVSRQPPKSPQVLYSPVSPLSPHRLLDTSFASSERLNKAHVSPQKHFTADSALRQQTLPRPMKTLQRSLSDPKPLSPTAEESAKERFSLYQHQGGLGSQVSALPPNSLVRKVKRTLPSPPPEEAHLPLAGQASPQLYAASLLQRGLTGPTTVPATKASLLRELDRDLRLVEHESTKLRKKQAELDEEEKEIDAKLKYLELGITQRKESLAKDRGGRDYPPLRGLGEHRDYLSDSELNQLRLQGCTTPAGQFVDFPATAAAPATPSGPTAFQQPRFQPPAPQYSAGSGGPTQNGFPAHQAPTYPGPSTYPAPAFPPGASYPAEPGLPNQQAFRPTGHYAGQTPMPTTQSTLFPVPADSRAPLQKPRQTSLADLEQKVPTNYEVIASPVVPMSSAPSETSYSGPAVSSGYEQGKVPEVPRAGDRGSVSQSPAPTYPSDSHYTSLEQNVPRNYVMIDDISELTKDSTSTAPDSQRLEPLGPGSSGRPGKEPGEPGVLDGPTLPCCYARGEEESEEDSYDPRGKGGHLRSMESNGRPASTHYYGDSDYRHGARVEKYGPGPMGPKHPSKSLAPAAISSKRSKHRKQGMEQKISKFSPIEEAKDVESDLASYPPPAVSSSLVSRGRKFQDEITYGLKKNVYEQQKYYGMSSRDAVEDDRIYGGSSRSRAPSAYSGEKLSSHDFSGWGKGYEREREAVERLQKAGPKPSSLSMAHSRVRPPMRSQASEEESPVSPLGRPRPAGGPLPPGGDTCPQFCSSHSMPDVQEHVKDGPRAHAYKREEGYILDDSHCVVSDSEAYHLGQEETDWFDKPRDARSDRFRHHGGHAVSSSSQKRGPARHSYHDYDEPPEEGLWPHDEGGPGRHASAKEHRHGDHGRHSGRHTGEEPGRRAAKPHARDLGRHEARPHSQPSSAPAMPKKGQPGYPSSAEYSQPSRASSAYHHASDSKKGSRQAHSGPAALQSKAEPQAQPQLQGRQAAPGPQQSQSPSSRQIPSGAASRQPQTQQQQQGLGLQPPQQALTQARLQQQSQPTTRGSAPAASQPAGKPQPGPSTATGPQPAGPPRAEQTNGSKGTAKAPQQGRAPQAQPTPGPGPAGVKAGARPGGTPGAPAGQPGADGESVFSKILPGGAAEQAGKLTEAVSAFGKKFSSFW

SEQ ID NO: 101 - protein, 350 aa, Homo sapiens
MPGHLPSEDSHYGMEMLTAKAIGISEPIKVLYSKFLMHPEELFVVGLPEGISLRRPNCFGIAKLWKILEASNSIQFVIKSPLLASMIFPVSSAHHKPQPPNRLALTGQVVLKMETLEAVRPKLLTEGVKEPIVDSQGTQHGVAGHGTASSLGFSPPALPPERDSRDPLVGESLKRQGFQENYDARLLRIDIANTLREQVQELFNKTYGEALGIKYPVQVPYKWIKSNPGSMIIEELPPGILFRKPFGSQNLERILAMANKITFTVTRPFQGLIRKPDEDDTNRLGEVILQEQVKELFNEKYSQCLWLLQQQQHHISEGRPFAEICNDAKVPGYTEPFTRHLGATWHDGSD

SEQ ID NO: 102 - protein, 1241 aa, Homo sapiens
MAHLELLLVENFKSWRGRQVIGPFRRFTCIIGPNGSGKSNVMDALSFVMGEKIANLRVKNIQELIHGAHIGKPISSSASVKIIYVEESGEEKTFARIIRGGCSEFRFNDNLVSRSVYIAELEKIGIIVKAQNCLVFQGTVESISVKKPKERTQFFEEISTSGELIGEYEEKKRKLQKAEEDAQFNFNKKKNIAAERRQAKLEKEEAERYQSLLEELKMNKIQLQLFQLYHNEKKIHLLNTKLEHVNRDLSVKRESLSHHENIVKARKKEHGMLTRQLQQTEKELKSVETLLNQKRPQYIKAKENTSHHLKKLDVAKKSIKDSEKQCSKQEDDIKALETELADLDAAWRSFEKQIEEEILHKKRDIELEASQLDRYKELKEQVRKKVATMTQQLEKLQWEQKTDEERLAFEKRRHGEVQGNLKQIKEQIEDHKKRIEKLEEYTKTCMDCLKEKKQQEETLVDEIEKTKSRMSEFNEELNLIRSELQNAGIDTHEGKRQQKRAEVLEHLKRLYPDSVFGRLFDLCHPIHKKYQLAVTKVFGRFITAIVVASEKVAKDCIRFLKEERAEPETFLALDYLDIKPINERLRELKGCKMVIDVIKTQFPQLKKVIQFVCGNGLVCETMEEARHIALSGPERQKTVALDGTLFLKSGVISGGSSDLKYKARCWDEKELKNLRDRRSQKIQELKGLMKTLRKETDLKQIQTLIQGTQTRLKYSQNELEMIKKKHLVAFYQEQSQLQSELLNIESQCIMLSEGIKERQRRIKEFQEKIDKVEDDIFQHFCEEIGVENIREFENKHVKRQQEIDQKRYFYKKILEFEKQKTRLNVQLEYSRSHLKKKLNKINTLKETIQKGSEDIDHLKKAEENCLQTVNELMAKQQQLKDIRVTQNSSAEKVQTQIEEERKKFLAVDREVGKLQKEVVSIQTSLEQKRLEKHNLLLDCKVQDIEIILLSGSLDDIIEVEMGTEAESTQATIDIYEKEEAFEIDYSSLKEDLKALQSDQEIEAHLRLLLQQVASQEDILLKTAAPNLRALENLKTVRDKFQESTDAFEASRKEARLCRQEFEQVKKRRYDLFTQCFEHVSISIDQIYKKLCRNNSAQAFLSPENPEEPYLEGISYNCVAPGKRFMPMDNLSGGEKCVAALALLFAVHSFRPAPFFVLDEVDAALDNTNIGKVSSYIKEQTQDQFQMIVISLKEEFYSRADALIGIYPEYDDCMFSRVLTLDLSQYPDTEGQESSKRHGESR

SEQ ID NO: 103 - protein, 2210 aa, Homo sapiens
MTAAANWVANGASLEDCHSNLFSLAELTGIKWRRYNFGGHGDCGPIISAPAQDDPILLSFIRCLQANLLCVWRRDVKPDCKELWIFWWGDEPNLVGVIHHELQVVEEGLWENGLSYECRTLLFKAIHNLLERCLMDKNFVRIGKWFVRPYEKDEKPVNKSEHLSCAFTFFLHGESNVCTSVEIAQHQPIYLINEEHIHMAQSSPAPFQVLVSPYGLNGTLTGQAYKMSDPATRKLIEEWQYFYPMVLKKKEESKEEDELGYDDDFPVAVEVIVGGVRMVYPSAFVLISQNDIPVPQSVASAGGHIAVGQQGLGSVKDPSNCGMPLTPPTSPEQAILGESGGMQSAASHLVSQDGGMITMHSPKRSGKIPPKLHNHMVHRVWKECILNRTQSKRSQMSTPTLEEEPASNPATWDFVDPTQRVSCSCSRHKLLKRCAVGPNRPPTVSQPGFSAGPSSSSSLPPPASSKHKTAERQEKGDKLQKRPLIPFHHRPSVAEELCMEQDTPGQKLGLAGIDSSLEVSSSRKYDKQMAVPSRNTSKQMNLNPMDSPHSPISPLPPTLSPQPRGQETESLDPPSVPVNPALYGNGLELQQLSTLDDRTVLVGQRLPLMAEVSETALYCGIRPSNPESSEKWWHSYRLPPSDDAEFRPPELQGERCDAKMEVNSESTALQRLLAQPNKRFKIWQDKQPQLQPLHFLDPLPLSQQPGDSLGEVNDPYTFEDGDIKYIFTANKKCKQGTEKDSLKKNKSEDGFGTKDVTTPGHSTPVPDGKNAMSIFSSATKTDVRQDNAAGRAGSSSLTQVTDLAPSLHDLDNIFDNSDDDELGAVSPALRSSKMPAVGTEDRPLGKDGRAAVPYPPTVADLQRMFPTPPSLEQHPAFSPVMNYKDGISSETVTALGMMESPMVSMVSTQLTEFKMEVEDGLGSPKPEEIKDFSYVHKVPSFQPFVGSSMFAPLKMLPSHCLLPLKIPDACLFRPSWAIPPKIEQLPMPPAATFIRDGYNNVPSVGSLADPDYLNTPQMNTPVTLNSAAPASNSGAGVLPSPATPRFSVPTPRTPRTPRTPRGGGTASGQGSVKYDSTDQGSPASTPSTTRPLNSVEPATMQPIPEAHSLYVTLILSDSVMNIFKDRNFDSCCICACNMNIKGADVGLYIPDSSNEDQYRCTCGFSAIMNRKLGYNSGLFLEDELDIFGKNSDIGQAAERRLMMCQSTFLPQVEGTKKPQEPPISLLLLLQNQHTQPFASLNFLDYISSNNRQTLPCVSWSYDRVQADNNDYWTECFNALEQGRQYVDNPTGGKVDEALVRSATVHSWPHSNVLDISMLSSQDVVRMLLSLQPFLQDAIQKKRTGRTWENIQHVQGPLTWQQFHKMAGRGTYGSEESPEPLPIPTLLVGYDKDFLTISPFSLPFWERLLLDPYGGHRDVAYIVVCPENEALLEGAKTFFRDLSAVYEMCRLGQHKPICKVLRDGIMRVGKTVAQKLTDELVSEWFNQPWSGEENDNHSRLKLYAQVCRHHLAPYLATLQLDSSLLIPPKYQTPPAAAQGQATPGNAGPLAPNGSAAPPAGSAFNPTSNSSSTNPAASSSASGSSVPPVSSSASAPGISQISTTSSSGFSGSVGGQNPSTGGISADRTQGNIGCGGDTDPGQSSSQPSQDGQESVTERERIGIPTEPDSADSHAHPPAVVIYMVDPFTYAAEEDSTSGNFWLLSLMRCYTEMLDNLPEHMRNSFILQIVPCQYMLQTMKDEQVFYIQYLKSMAFSVYCQCRRPLPTQIHIKSLTGFGPAASIEMTLKNPERPSPIQLYSPPFILAPIKDKQTELGETFGEASQKYNVLFVGYCLSHDQRWLLASCTDLHGELLETCVVNIALPNRSRRSKVSARKIGLQKLWEWCIGIVQMTSLPWRVVIGRLGRLGHGELKDWSILLGECSLQTISKKLKDVCRMCGISAADSPSILSACLVAMEPQGSFVVMPDAVTMGSVFGRSTALNMQSSQLNTPQDASCTHILVFPTSSTIQVAPANYPNEDGFSPNNDDMFVDLPFPDDMDNDIGILMTGNLHSSPNSSPVPSPGSPSGIGVGSHFQHSRSQGERLLSREAPEELKQQPLALGYFVSTAKAENLPQWFWSSCPQAQNQCPLFLKASLHHHISVAQTDELLPARNSQRVPHPLDSKTTSDVLRFVLEQYNALSWLTCNPATQDRTSCLPVHFVVLTQLYNAIMNIL

SEQ ID NO: 104 - protein, 2151 aa, Homo sapiens
MLSSGVETQPVPLDSSMSAVVQELYSELPVSVSRELHADPEPSVIPDVKPGASSSLLSQNRALPLELQRTHVESCCEETYETLDHGSEPGRCGLVDSTAGGSVASGILDRAKRSESMEPKVFRDPGGQAGIIREPSEGAKEDPHQHSTAAEEKTSPSQEDLLMQSSKELSHVDLPEDFLRSKEGNVQITAETLLKSAEVQGMKVNGTKTDNNEGHKNGNVSKDLSAGCGEFQEVDKIMTSDEVSETSTLVTPEPLTFVDPVLTEATPKEKECEELKSCPWLSLPGNSAISNVDNGKEELCKPNLVCEADDNHQQLHGHHNEQPSSTHDSPTATSPLKENSEVSCFTSDLSGPESRTISLENCGFEGGGLLKRSAEKTDSSYFYRGDDQGKNLASREENEERLLIPRSERGGPFLFNAREPEKEISGRCSGEKEPVVSPKENIHNNCIQDSLHTGNSSSLMPNSFTEATEVMLNKNDLKITVHVQGNLTNPEDHKETFTNMSHPGGHSEESSFSSLMQIEEAGQTTPVEPNILSKSFYTKDCNSLVSIQRNLEGNTQLNEASCNDFLFERKSIVSLMPEDQISPVSEVLKPKQGTALLLPSPEFDYRPESEKVIQTSHDDIPLLDEQSIACEMNELSCTNELVVNKVESECVLNQQVSLNSQEHANLPTDSLLHLNKEMPLATGRDAHQSHHPPLEGRADVIADIQTIPIQTKIKDISPPGNQTCGASSNCPTLNIKPVSLERKKEMADSGTKALHSRLRSNKREAAGFPQVVSVIECHSVQSQDISSCHRVRKNVSQENMCSASAAFKSSKISLQVDNSLITKYENAFQHRDHCCQGTGHSVEKSSCKVSYTSQERELDGKETNGSLPGDKIRNKMVAGLLNSGISNKTIHTSSSIKLSEEGLEGKEQDVSKETVFCKYNISDHAIQELNQTVNIPGPEKVLDQSPTVMFSSFKNVKSVETLDQKADEVLDCQSNQNRPDECKSEGQSAKEMLSSDQRETVTEPHGEVNHNQKDLLVSSGSNNSLPCGSPKKCNLKGAFVKMSGCDESTEGMVDIVYTDCSNKLAEGVLDVKASNLLDCGARQEKLAFQEDSRSTLSRRELDAAHTGTTGQDSDFPVTAASTVDFLKIKKSCEENVCRSLKDCEMEKCPDSCAHEMESVADHEPNKRILGRVNLSLNDSHYGQQDKGTSLRETQEMTEGSRLEPNSEFGKESTFGISSKESMSCHDESSVSLRSLKSIEIMPSQENSETNVNSEETDLKNLCKPKDGEMLCENVKDCTVLPEMKEIVSRDWSNSSDRDSVCTCVEKNACKACHPHENSSDRHLPLTVKTDIKVKGEETEEHQRGRLGYLTVGEQSEELVTRETGDGDPVSNISQTHFKCRGILNHAEKQQSPEVLDYMLQKEEKYIRQQKAHTISQQCISSSLLLDDAQNQNQPKADKDESTMINEITLAKLAKDSIVAQTQKLEDQKEERLHHPLRKDTESCTSPCLLGAPRKAQDPSSAGCDQIHGAFAKKGVLPLKKQPHRTCKKVSYQEQIIVGRKIGKIRSSAFLKSSSNPIPTKAHRLLSLCTLSAPTRLEPETAPTKSLVSHIPKQMSTPCHPLRSLNFRKTTKESALLNKLSILASKLAPAMKTQKLRYRRCSSELLPMAKSYKRLRYKRLLDGFSSSTEQLNPYLAASGWDKRPNSKPMALYSLESIKMTFIDLSNKMPSLLFGSEIFPVSFHVKSSSSDCTTESSRTFPEHCAPARLALGEALQCPSQPPKWTFSFFLSHGCPGMATFREDTGVHSQTHTQAPPQPPAPLQDYGGTAIVQTRADCSVLGLHTLLALCSPGCYRIWTKKRSFSSHMPTMQRLFMTQFTQGLKGLRSPASIADKVFCSLPYSVGRVLSIWSQHGPSVCSFEISSLHSPHCKRQPSLGTTSSHTMLPYVPLPGMEATYNTSGSQTRLEPPFPALVPKSCLVAESAVSKLLLSASEFQVRGLDELDGVKAACPCPQSSPPEQKEAEPEKRPKKVSQIRIRKTIPRPDPNLTPMGLPRPKRLKKKEFSLEEIYTNKNYKSPPANRCLETIFEEPKERNGTLISISQQKRKRVLEFQDFTVPRKRRARGKVKVAGSFTRAQKAAVQSRELDALLIQKLMELETFFAKEEEQEQSSGC

SEQ ID NO: 105 - protein, 3433 aa, Homo sapiens
MAKYGEHEASPDNGQNEFSDIIKSRSDEHNDVQKKTFTKWINARFSKSGKPPINDMFTDLKDGRKLLDLLEGLTGTSLPKERGSTRVHALNNVNRVLQVLHQNNVELVNIGGTDIVDGNHKLTLGLLWSIILHWQVKDVMKDVMSDLQQTNSEKILLSWVRQTTRPYSQVNVLNFTTSWTDGLAFNAVLHRHKPDLFSWDKVVKMSPIERLEHAFSKAQTYLGIEKLLDPEDVAVRLPDKKSIIMYLTSLFEVLPQQVTIDAIREVETLPRKYKKECEEEAINIQSTAPEEEHESPRAETPSTVTEVDMDLDSYQIALEEVLTWLLSAEDTFQEQDDISDDVEEVKDQFATHEAFMMELTAHQSSVGSVLQAGNQLITQGTLSDEEEFEIQEQMTLLNARWEALRVESMDRQSRLHDVLMELQKKQLQQLSAWLTLTEERIQKMETCPLDDDVKSLQKLLEEHKSLQSDLEAEQVKVNSLTHMVVIVDENSGESATAILEDQLQKLGERWTAVCRWTEERWNRLQEINILWQELLEEQCLLKAWLTEKEEALNKVQTSNFKDQKELSVSVRRLAILKEDMEMKRQTLDQLSEIGQDVGQLLDNSKASKKINSDSEELTQRWDSLVQRLEDSSNQVTQAVAKLGMSQIPQKDLLETVRVREQAITKKSKQELPPPPPPKKRQIHVDIEAKKKFDAISAELLNWILKWKTAIQTTEIKEYMKMQDTSEMKKKLKALEKEQRERIPRADELNQTGQILVEQMGKEGLPTEEIKNVLEKVSSEWKNVSQHLEDLERKIQLQEDINAYFKQLDELEKVIKTKEEWVKHTSISESSRQSLPSLKDSCQRELTNLLGLHPKIEMARASCSALMSQPSAPDFVQRGFDSFLGRYQAVQEAVEDRQQHLENELKGQPGHAYLETLKTLKDVLNDSENKAQVSLNVLNDLAKVEKALQEKKTLDEILENQKPALHKLAEETKALEKNVHPDVEKLYKQEFDDVQGKWNKLKVLVSKDLHLLEEIALTLRAFEADSTVIEKWMDGVKDFLMKQQAAQGDDAGLQRQLDQCSAFVNEIETIESSLKNMKEIETNLRSGPVAGIKTWVQTRLGDYQTQLEKLSKEIATQKSRLSESQEKAANLKKDLAEMQEWMTQAEEEYLERDFEYKSPEELESAVEEMKRAKEDVLQKEVRVKILKDNIKLLAAKVPSGGQELTSELNVVLENYQLLCNRIRGKCHTLEEVWSCWIELLHYLDLETTWLNTLEERMKSTEVLPEKTDAVNEALESLESVLRHPADNRTQIRELGQTLIDGGILDDIISEKLEAFNSRYEDLSHLAESKQISLEKQLQVLRETDQMLQVLQESLGELDKQLTTYLTDRIDAFQVPQEAQKIQAEISAHELTLEELRRNMRSQPLTSPESRTARGGSQMDVLQRKLREVSTKFQLFQKPANFEQRMLDCKRVLDGVKAELHVLDVKDVDPDVIQTHLDKCMKLYKTLSEVKLEVETVIKTGRHIVQKQQTDNPKGMDEQLTSLKVLYNDLGAQVTEGKQDLERASQLARKMKKEAASLSEWLSATETELVQKSTSEGLLGDLDTEISWAKNVLKDLEKRKADLNTITESSAALQNLIEGSEPILEERLCVLNAGWSRVRTWTEDWCNTLMNHQNQLEIFDGNVAHISTWLYQAEALLDEIEKKPTSKQEEIVKRLVSELDDANLQVENVRDQALILMNARGSSSRELVEPKLAELNRNFEKVSQHIKSAKLLIAQEPLYQCLVTTETFETGVPFSDLEKLENDIENMLKFVEKHLESSDEDEKMDEESAQIEEVLQRGEEMLHQPMEDNKKEKIRLQLLLLHTRYNKIKAIPIQQRKMGQLASGIRSSLLPTDYLVEINKILLCMDDVELSLNVPELNTAIYEDFSFQEDSLKNIKDQLDKLGEQIAVIHEKQPDVILEASGPEAIQIRDTLTQLNAKWDRINRMYSDRKGCFDRAMEEWRQFHCDLNDLTQWITEAEELLVDTCAPGGSLDLEKARIHQQELEVGISSHQPSFAALNRTGDGIVQKLSQADGSFLKEKLAGLNQRWDAIVAEVKDRQPRLKGESKQVMKYRHQLDEIICWLTKAEHAMQKRSTTELGENLQELRDLTQEMEVHAEKLKWLNRTELEMLSDKSLSLPERDKISESLRTVNMTWNKICREVPTTLKECIQEPSSVSQTRIAAHPNVQKVVLVSSASDIPVQSHRTSEISIPADLDKTITELADWLVLIDQMLKSNIVTVGDVEEINKTVSRMKITKADLEQRHPQLDYVFTLAQNLKNKASSSDMRTAITEKLERVKNQWDGTQHGVELRQQQLEDMIIDSLQWDDHREETEELMRKYEARLYILQQARRDPLTKQISDNQILLQELGPGDGIVMAFDNVLQKLLEEYGSDDTRNVKETTEYLKTSWINLKQSIADRQNALEAEWRTVQASRRDLENFLKWIQEAETTVNVLVDASHRENALQDSILARELKQQMQDIQAEIDAHNDIFKSIDGNRQKMVKALGNSEEATMLQHRLDDMNQRWNDLKAKSASIRAHLEASAEKWNRLLMSLEELIKWLNMKDEELKKQMPIGGDVPALQLQYDHCKALRRELKEKEYSVLNAVDQARVFLADQPIEAPEEPRRNLQSKTELTPEERAQKIAKAMRKQSSEVKEKWESLNAVTSNWQKQVDKALEKLRDLQGAMDDLDADMKEAESVRNGWKPVGDLLIDSLQDHIEKIMAFREEIAPINFKVKTVNDLSSQLSPLDLHPSLKMSRQLDDLNMRWKLLQVSVDDRLKQLQEAHRDFGPSSQHFLSTSVQLPWQRSISHNKVPYYINHQTQTTCWDHPKMTELFQSLADLNNVRFSAYRTAIKIRRLQKALCLDLLELSTTNEIFKQHKLNQNDQLLSVPDVINCLTTTYDGLEQMHKDLVNVPLCVDMCLNWLLNVYDTGRTGKIRVQSLKIGLMSLSKGLLEEKYRYLFKEVAGPTEMCDQRQLGLLLHDAIQIPRQLGEVAAFGGSNIEPSVRSCFQQNNNKPEISVKEFIDWMHLEPQSMVWLPVLHRVAAAETAKHQAKCNICKECPIVGFRYRSLKHFNYDVCQSCFFSGRTAKGHKLHYPMVEYCIPTTSGEDVRDFTKVLKNKFRSKKYFAKHPRLGYLPVQTVLEGDNLETPITLISMWPEHYDPSQSPQLFHDDTHSRIEQYATRLAQMERTNGSFLTDSSSTTGSVEDEHALIQQYCQTLGGESPVSQPQSPAQILKSVEREERGELERIIADLEEEQRNLQVEYEQLKDQHLRRGLPVGSPPESIISPHHTSEDSELIAEAKLLRQHKGRLEARMQILEDHNKQLESQLHRLRQLLEQPESDSRINGVSPWASPQHSALSYSLDPDASGPQFHQAAGEDLLAPPHDTSTDLTEVMEQIHSTFPSCCPNVPSRPQAM

SEQ ID NO: 106 - protein, 952 aa, Homo sapiens
MGVRHPPCSHRLLAVCALVSLATAALLGHILLHDFLLVPRELSGSSPVLEETHPAHQQGASRPGPRDAQAHPGRPRAVPTQCDVPPNSRFDCAPDKAITQEQCEARGCCYIPAKQGLQGAQMGQPWCFFPPSYPSYKLENLSSSEMGYTATLTRTTPTFFPKDILTLRLDVMMETENRLHFTIKDPANRRYEVPLETPRVHSRAPSPLYSVEFSEEPFGVIVHRQLDGRVLLNTTVAPLFFADQFLQLSTSLPSQYITGLAEHLSPLMLSTSWTRITLWNRDLAPTPGANLYGSHPFYLALEDGGSAHGVFLLNSNAMDVVLQPSPALSWRSTGGILDVYIFLGPEPKSVVQQYLDVVGYPFMPPYWGLGFHLCRWGYSSTAITRQVVENMTRAHFPLDVQWNDLDYMDSRRDFTFNKDGFRDFPAMVQELHQGGRRYMMIVDPAISSSGPAGSYRPYDEGLRRGVFITNETGQPLIGKVWPGSTAFPDFTNPTALAWWEDMVAEFHDQVPFDGMWIDMNEPSNFIRGSEDGCPNNELENPPYVPGVVGGTLQAATICASSHQFLSTHYNLHNLYGLTEAIASHRALVKARGTRPFVISRSTFAGHGRYAGHWTGDVWSSWEQLASSVPEILQFNLLGVPLVGADVCGFLGNTSEELCVRWTQLGAFYPFMRNHNSLLSLPQEPYSFSEPAQQAMRKALTLRYALLPHLYTLFHQAHVAGETVARPLFLEFPKDSSTWTVDHQLLWGEALLITPVLQAGKAEVTGYFPLGTWYDLQTVPIEALGSLPPPPAAPREPAIHSEGQWVTLPAPLDTINVHLRAGYIIPLQGPGLTTTESRQQPMALAVALTKGGEARGELFWDDGESLEVLERGAYTQVIFLARNNTIVNELVRVTSEGAGLQLQKVTVLGVATAPQQVLSNGVPVSNFTYSPDTKVLDICVSLLMGEQFLVSWC

SEQ ID NO: 107 - protein, 111 aa, Homo sapiens
DRASSNPNATSSSSQDPESLQDRGEGKVATTVISKMLFVEPILEVSSLPTTNSTTNSATKITANTTEAVLGDALVDFSLKLYHAFSAMKKVETNMAFSPFSIASLLTQVLL

SEQ ID NO: 108 - protein, 2455 aa, Homo sapiens
MALGKVLAMALVLALAVLGSLSPGARAGDCKGQRQVLREAPGFVTDGAGNYSVNGNCEWLIEAPSPQHRILLDFLFLDTECTYDYLFVYDGDSPRGPLLASLSGSTRPPPIEASSGKMLLHLFSDANYNLLGFNASFRFSLCPGGCQSHGQCQPPGVCACEPGWGGPDCGLQECSAYCGSHGTCASPLGPCRCEPGFLGRACDLHLWENQGAGWWHNVSARDPAFSARIGAAGAFLSPPGLLAVFGGLAGHAAALVDDVWLYVSGGRTPHDLFSSGLFRFRLDSTSGGYWEQVIPAGGRPPAATGHSMVFHAPSRALLVHGGHRPSTARFSVRVNSTELFHVDRHVWTTLKGRDGLQGPRERAFHTASVLGNYMVVYGRAAPPSGRYSHVAAVLGGSVLLVAGGYSGRPRGDLMAYKVPPFVFQAPAPDYHLDYCSMYTDHSVCSRDPECSWCQGACQAAPPPGTPLGACPAASCLGLGRLLGDCQACLAFSSPTAPPRGPGTLGWCVHNESCLPRPGECPQQWAGRRGPEHSTLTHRPPPPVFSEQARCRGEQISGTVGWWGPAPVFVTSLEACVTQSFLPGLHLLTFQQPPNTSQPDKEISFFFLEPYRSSSCTSYSSCLGCLADQGCGWCLTSATCHLRQGGAHCGDDGAGGSLLVLVPTLCPLCEEHRDCHACTQVPVGPPGEVTRCLQGDFSGPLGGGNCSLWVGEGLGLPVALPARWAYARCPDVDECRLGLARCHPRATCLNTPLSYECHCQRGYQGDGISHCNRTCLEDCGHGVCSGPPDFTCVCDLGWTSDLPPPTPAPGPPAPRCSRDCGCSFHSHCRKRGPGFCDECQDWTWGEHCERCRPGSFGNATGSRGCRPCQCNGHGDPRRGHCDNLSGLCFCQDHTEGAHCQLCSPGYYGDPRAGGSCFRECGGRALLTNVSSVALGSRRVGGLLPPGGGAARAGPGLSYCVWVVSATEELQPCAPGTLCPPLTLTFSPDSSTPCTLSYVLAFDGFPRFLDTGVVQSDRSLIAAFCGQRRDRPLTVQALSGLLVLHWEANGSSSWGFNASVGSARCGSGGPGSCPVPQECVPQDGAAGAGLCRCPQGWAGPHCRMALCPENCNAHTGAGTCNQSLGVCICAEGFGGPDCATKLDGGQLVWETLMDSRLSADTASRFLHRLGHTMVDGPDATLWMFGGLGLPQGLLGNLYRYSVSERRWTQMLAGAEDGGPGPSPRSFHAAAYVPAGRGAMYLLGGLTAGGVTRDFWVLNLTTLQWRQEKAPQTVELPAVAGHTLTARRGLSLLLVGGYSPENGFNQQLLEYQLATGTWVSGAQSGTPPTGLYGHSAVYHEATDSLYVFGGFRFHVELAAPSPELYSLHCPDRTWSLLAPSQGAKRDRMRNVRGSSRGLGQVPGEQPGSWGFREVRKKMALWAALAGTGGFLEEISPHLKEPRPRLFHASALLGDTMVVLGGRSDPDEFSSDVLLYQVNCNAWLLPDLTRSASVGPPMEESVAHAVAAVGSRLYISGGFGGVALGRLLALTLPPDPCRLLSSPEACNQSGACTWCHGACLSGDQAHRLGCGGSPCSPMPRSPEECRRLRTCSECLARHPRTLQPGDGEASTPRCKWCTNCPEGACIGRNGSCTSENDCRINQREVFWAGNCSEAACGAADCEQCTREGKCMWTRQFKRTGETRRILSVQPTYDWTCFSHSLLNVSPMPVESSPPLPCPTPCHLLPNCTSCLDSKGADGGWQHCVWSSSLQQCLSPSYLPLRCMAGGCGRLLRGPESCSLGCAQATQCALCLRRPHCGWCAWGGQDGGGRCMEGGLSGPRDGLTCGRPGASWAFLSCPPEDECANGHHDCNETQNCHDQPHGYECSCKTGYTMDNMTGLCRPVCAQGCVNGSCVEPDHCRCHFGFVGRNCSTECRCNRHSECAGVGARDHCLLCRNHTKGSHCEQCLPLFIENWVTEGPSEDEAVCVNCQNNSYGEKCESCLQGYFLLDGKCTKCQCNGHADTCNEQDGTGCPCQNNTETGTCQGSSPSDRRDCYKYQCAKCRESFHGSPLGGQQCYRLISVEQECCLDPTSQTNCFHEPKRRALGPGRTVLFGVQPKFTNVDIRLTLDVTFGAVDLYVSTSYDTFVVRVAPDTGVHTVHIQPPPAPPPPPPPADGGPRGAGDPGGAGASSGPGAPAEPRVREVWPRGLITYVTVTEPSAVLVVRGVRDRLVITYPHEHHALKSSRFYLLLLGVGDPSGPGANGSADSQGLLFFRQDQAHIDLFVFFSVFFSCFFLFLSLCVLLWKAKQALDQRQEQRRHLQEMTKMASRPFAKVTVCFPPDPTAPASAWKPAGLPPPAFRRSEPFLAPLLLTGAGGPWGPMGGGCCPPAIPATTAGLRAGPITLEPTEDGMAGVATLLLQLPGGPHAPNGACLGSALVTLRHRLHEYCGGGGGAGGSGHGTGAGRKGLLSQDNLTSMSL

SEQ ID NO: 109 - protein, 608 aa, Homo sapiens
MTEAALVEGQVKLRDGKKWKSRWLVLRKPSPVADCLLMLVYKDKSERIKGLRERSSLTLEDICGLEPGLPYEGLVHTLAIVCLSQAIMLGFDSHEAMCAWDARIRYALGEVHRFHVTVAPGTKLESGPATLHLCNDVLVLARDIPPAVTGQWKLSDLRRYGAVPSGFIFEGGTRCGYWAGVFFLSSAEGEQISFLFDCIVRGISPTKGPFGLRPVLPDPSPPGPSTVEERVAQEALETLQLEKRLSLLSHAGRPGSGGDDRSLSSSSSEASHLDVSASSRLTAWPEQSSSSASTSQEGPRPAAAQAAGEAMVGASRPPPKPLRPRQLQEVGRQSSSDSGIATGSHSSYSSSLSSYAGSSLDVWRATDELGSLLSLPAAGAPEPSLCTCLPGTVEYQVPTSLRAHYDTPRSLCLAPRDHSPPSQGSPGNSAARDSGGQTSAGCPSGWLGTRRRGLVMEAPQGSEATLPGPAPGEPWEAGGPHAGPPPAFFSACPVCGGLKGAAASAPGPATAHSGSPGPVAVDSPGPERPRGESPTYVNIPVSPSSRKQLHYMGLELQEASEGVRGAGASLYAQIDIMATETAHRVGVRHARAREEQLSELEQRKAAPQ

SEQ ID NO: 110 - protein, 470 aa, Homo sapiens
MMAAMATARVRMGPRCAQALWRMPWLPVFLSLAAAAAAAAAEQQVPLVLWSSDRDLWAPAADTHEGHITSDLQLSTYLDPALELGPRNVLLFLQDKLSIEDFTAYGGVFGNKQDSAFSNLENALDLAPSSLVLPAVDWYAVSTLTTYLQEKLGASPLHVDLATLRELKLNASLPALLLIRLPYTASSGLMAPREVLTGNDEVIGQVLSTLKSEDVPYTAALTAVRPSRVARDVAVVAGGLGRQLLQKQPVSPVIHPPVSYNDTAPRILFWAQNFSVAYKDQWEDLTPLTFGVQELNLTGSFWNDSFARLSLTYERLFGTTVTFKFILANRLYPVSARHWFTMERLEVHSNGSVAYFNASQVTGPSIYSFHCEYVSSLSKKGSLLVARTQPSPWQMMLQDFQIQAFNVMGEQFSYASDCASFFSPGIWMGLLTSLFMLFIFTYGLHMILSLKTMDRFDDHKGPTISLTQIV

SEQ ID NO: 111 - protein, 660 aa, Homo sapiens
MEALMARGALTGPLRALCLLGCLLSHAAAAPSPIIKFPGDVAPKTDKELAVQYLNTFYGCPKESCNLFVLKDTLKKMQKFFGLPQTGDLDQNTIETMRKPRCGNPDVANYNFFPRKPKWDKNQITYRIIGYTPDLDPETVDDAFARAFQVWSDVTPLRFSRIHDGEADIMINFGRWEHGDGYPFDGKDGLLAHAFAPGTGVGGDSHFDDDELWTLGEGQVVRVKYGNADGEYCKFPFLFNGKEYNSCTDTGRSDGFLWCSTTYNFEKDGKYGFCPHEALFTMGGNAEGQPCKFPFRFQGTSYDSCTTEGRTDGYRWCGTTEDYDRDKKYGFCPETAMSTVGGNSEGAPCVFPFTFLGNKYESCTSAGRSDGKMWCATTANYDDDRKWGFCPDQGYSLFLVAAHEFGHAMGLEHSQDPGALMAPIYTYTKNFRLSQDDIKGIQELYGASPDIDLGTGPTPTLGPVTPEICKQDIVFDGIAQIRGEIFFFKDRFIWRTVTPRDKPMGPLLVATFWPELPEKIDAVYEAPQEEKAVFFAGNEYWIYSASTLERGYPKPLTSLGLPPDVQRVDAAFNWSKNKKTYIFAGDKFWRYNEVKKKMDPGFPKLIADAWNAIPDNLDAVVDLQGGGHSYFFKGAYYLKLENQSLKSVKFGSIKSDWLGC

SEQ ID NO: 112 - protein, 2045 aa, Homo sapiens
MAGRSHPGPLRPLLPLLVVAACVLPGAGGTCPERALERREEEANVVLTGTVEEILNVDPVQHTYSCKVRVWRYLKGKDLVARESLLDGGNKVVISGFGDPLICDNQVSTGDTRIFFVNPAPPYLWPAHKNELMLNSSLMRITLRNLEEVEFCVEDKPGTHFTPVPPTPPDACRGMLCGFGAVCEPNAEGPGRASCVCKKSPCPSVVAPVCGSDASTYSNECELQRAQCSQQRRIRLLSRGPCGSRDPCSNVTCSFGSTCARSADGLTASCLCPATCRGAPEGTVCGSDGADYPGECQLLRRACARQENVFKKFDGPCDPCQGALPDPSRSCRVNPRTRRPEMLLRPESCPARQAPVCGDDGVTYENDCVMGRSGAARGLLLQKVRSGQCQGRDQCPEPCRFNAVCLSRRGRPRCSCDRVTCDGAYRPVCAQDGRTYDSDCWRQQAECRQQRAIPSKHQGPCDQAPSPCLGVQCAFGATCAVKNGQAACECLQACSSLYDPVCGSDGVTYGSACELEATACTLGREIQVARKGPCDRCGQCRFGALCEAETGRCVCPSECVALAQPVCGSDGHTYPSECMLHVHACTHQISLHVASAGPCETCGDAVCAFGAVCSAGQCVCPRCEHPPPGPVCGSDGVTYGSACELREAACLQQTQIEEARAGPCEQAECGSGGSGSGEDGDCEQELCRQRGGIWDEDSEDGPCVCDFSCQSVPGSPVCGSDGVTYSTECELKKARCESQRGLYVAAQGACRGPTFAPLPPVAPLHCAQTPYGCCQDNITAARGVGLAGCPSACQCNPHGSYGGTCDPATGQCSCRPGVGGLRCDRCEPGFWNFRGIVTDGRSGCTPCSCDPQGAVRDDCEQMTGLCSCKPGVAGPKCGQCPDGRALGPAGCEADASAPATCAEMRCEFGARCVEESGSAHCVCPMLTCPEANATKVCGSDGVTYGNECQLKTIACRQGLQISIQSLGPCQEAVAPSTHPTSASVTVTTPGLLLSQALPAPPGALPLAPSSTAHSQTTPPPSSRPRTTASVPRTTVWPVLTVPPTAPSPAPSLVASAFGESGSTDGSSDEELSGDQEASGGGSGGLEPLEGSSVATPGPPVERASCYNSALGCCSDGKTPSLDAEGSNCPATKVFQGVLELEGVEGQELFYTPEMADPKSELFGETARSIESTLDDLFRNSDVKKDFRSVRLRDLGPGKSVRAIVDVHFDPTTAFRAPDVARALLRQIQVSRRRSLGVRRPLQEHVRFMDFDWFPAFITGATSGAIAAGATARATTASRLPSSAVTPRAPHPSHTSQPVAKTTAAPTTRRPPTTAPSRVPGRRPPAPQQPPKPCDSQPCFHGGTCQDWALGGGFTCSCPAGRGGAVCEKVLGAPVPAFEGRSFLAFPTLRAYHTLRLALEFRALEPQGLLLYNGNARGKDFLALALLDGRVQLRFDTGSGPAVLTSAVPVEPGQWHRLELSRHWRRGTLSVDGETPVLGESPSGTDGLNLDTDLFVGGVPEDQAAVALERTFVGAGLRGCIRLLDVNNQRLELGIGPGAATRGSGVGECGDHPCLPNPCHGGAPCQNLEAGRFHCQCPPGRVGPTCADEKSPCQPNPCHGAAPCRVLPEGGAQCECPLGREGTFCQTASGQDGSGPFLADFNGFSHLELRGLHTFARDLGEKMALEVVFLARGPSGLLLYNGQKTDGKGDFVSLALRDRRLEFRYDLGKGAAVIRSREPVTLGAWTRVSLERNGRKGALRVGDGPRVLGESPVPHTVLNLKEPLYVGGAPDFSKLARAAAVSSGFDGAIQLVSLGGRQLLTPEHVLRQVDVTSFAGHPCTRASGHPCLNGASCVPREAAYVCLCPGGFSGPHCEKGLVEKSAGDVDTLAFDGRTFVEYLNAVTESEKALQSNHFELSLRTEATQGLVLWSGKATERADYVALAIVDGHLQLSYNLGSQPVVLRSTVPVNTNRWLRVVAHREQREGSLQVGNEAPVTGSSPLGATQLDTDGALWLGGLPELPVGPALPKAYGTGFVGCLRDVVVGRHPLHLLEDAVTKPELRPCPTP

SEQ ID NO: 113 - protein, 968 aa, Homo sapiens
MVLGCELSGSTRVVVGVEALLTGASSPLPGVGPANKHKPWIEAEYQGIVMENDNTVLLNPPLFALDKDAPLRYAGEICGFRLHGSGVPFEAVILDKATGEGLIRAKEPVDCEAQKEHTFTIQAYDCGEGPDGANTKKSHKATVHVRVNDVNEFAPVFVERLYRAAVTEGKLYDRILRVEAIDGDCSPQYSQICYYEILTPNTPFLIDNDGNIENTEKLQYSGERLYKFTVTAYDCGKKRAADDAEVEIQVKPTCKPSWQGWNKRIEYAPGAGSLALFPGIRLETCDEPLWNIQATIELQTSHVAKGCDRDNYSERALRKLCGAATGEVDLLPMPGPNANWTAGLSVHYSQDSSLIYWFNGTQAVQVPLGGPSGLGSGPQDSLSDHFTLSFWMKHGVTPNKGKKEEETIVCNTVQNEDGFSHYSLTVHGCRIAFLYWPLLESARPVKFLWKLEQVCDDEWHHYALNLEFPTVTLYTDGISFDPALIHDNGLIHPPRREPALMIGACWTEEKNKEKEKGDNSTDTTQGDPLSIHHYFHGYLAGFSVRSGRLESREVIECLYACREGLDYRDFESLGKGMKVHVNPSQSLLTLEGDDVETFNHALQHVAYMNTLRFATPGVRPLRLTTAVKCFSEESCVSIPEVEGYVVVLQPDAPQILLSGTAHFARPAVDFEGTNGVPLFPDLQITCSISHQVEAKKDESWQGTVTDTRMSDEIVHNLDGCEISLVGDDLDPERESLLLDTTSLQQRGLELTNTSAYLTIAGVESITVYEEILRQARYRLRHGAALYTRKFRLSCSEMNGRYSSNEFIVEVNVLHSMNRVAHPSHVLSSQQFLHRGHQPPPEMAGHSLASSHRNSMIPSAATLIIVVCVGFLVLMVVLGLVRIHSLHRRVSGAGGPPGASSDPKDPDLFWDDSALTIIVNPMESYQNRQSCVTGAVGGQQEDEDSSDSEVADSPSSDERRIIETPPHRY

SEQ ID NO: 114 - protein, 1144 aa, Homo sapiens
MKLSRQFTVFGSAIFCVVIFSLYLMLDRGHLDYPRNPRREGSFPQGQLSMLQEKIDHLERLLAENNEIISNIRDSVINLSESVEDGPKSSQSNFSQGAGSHLLPSQLSLSVDTADCLFASQSGSHNSDVQMLDVYSLISFDNPDGGVWKQGFDITYESNEWDTEPLQVFVVPHSHNDPGWLKTFNDYFRDKTQYIFNNMVLKLKEDSRRKFIWSEISYLSKWWDIIDIQKKDAVKSLIENGQLEIVTGGWVMPDEATPHYFALIDQLIEGHQWLENNIGVKPRSGWAIDPFGHSPTMAYLLNRAGLSHMLIQRVHYAVKKHFALHKTLEFFWRQNWDLGSVTDILCHMMPFYSYDIPHTCGPDPKICCQFDFKRLPGGRFGCPWGVPPETIHPGNVQSRARMLLDQYRKKSKLFRTKVLLAPLGDDFRYCEYTEWDLQFKNYQQLFDYMNSQSKFKVKIQFGTLSDFFDALDKADETQRDKGQSMFPVLSGDFFTYADRDDHYWSGYFTSRPFYKRMDRIMESHLRAAEILYYFALRQAHKYKINKFLSSSLYTALTEARRNLGLFQHHDAITGTAKDWVVVDYGTRLFHSLMVLEKIIGNSAFLLILKDKLTYDSYSPDTFLEMDLKQKSQDSLPQKNIIRLSAEPRYLVVYNPLEQDRISLVSVYVSSPTVQVFSASGKPVEVQVSAVWDTANTISETAYEISFRAHIPPLGLKVYKILESASSNSHLADYVLYKNKVEDSGIFTIKNMINTEEGITLENSFVLLRFDQTGLMKQMMTKEDGKHHEVNVQFSWYGTTIKRDKSGAYLFLPDGNAKPYVYTTPPFVRVTHGRIYSEVTCFFDHVTHRVRLYHIQGIEGQSVEVSNIVDIRKVYNREIAMKISSDIKSQNRFYTDLNGYQIQPRMTLSKLPLQANVYPMTTMAYIQDAKHRLTLLSAQSLGVSSLNSGQIEVIMDRRLMQDDNRGLEQGIQDNKITANLFRILLEKRSAVNTEEEKKSVSYPSLLSHITSSLMNHPVIPMANKFSSPTLELQGEFSPLQSSLPCDIHLVNLRTIQSKVGNGHSNEAALILHRKGFDCRFSSKGTGLFCSTTQGKILVQKLLNKFIVESLTPSSLSLMHSPPGTQNISEINLSPMEISTFRIQLR

SEQ ID NO: 115 - protein, 411 aa, Homo sapiens
MLLKTVLLLGHVAQVLMLDNGLLQTPPMGWLAWERFRCNINCDEDPKNCISEQLFMEMADRMAQDGWRDMGYTYLNIDDCWIGGRDASGRLMPDPKRFPHGIPFLADYVHSLGLKLGIYADMGNFTCMGYPGTTLDKVVQDAQTFAEWKVDMLKLDGCFSTPEERAQGYPKMAAALNATGRPIAFSCSWPAYEGGLPPRVNYSLLADICNLWRNYDDIQDSWWSVLSILNWFVEHQDILQPVAGPGHWNDPDMLLIGNFGLSLEQSRAQMALWTVLAAPLLMSTDLRTISAQNMDILQNPLMIKINQDPLGIQGRRIHKEKSLIEVYMRPLSNKASALVFFSCRTDMPYRYHSSLGQLNFTGSVIYEAQDVYSGDIISGLRDETNFTVIINPSGVVMWYLYPIKNLEMSQQ

SEQ ID NO: 116 - protein, 331 aa, Homo sapiens [sequence omitted]

SEQ ID NO: 117 - protein, 242 aa, Homo sapiens
MSNPRSLEEEKYDMSGARLALILCVTKAREGSEEDLDALEHMFRQLRFESTMKRDPTAEQFQEELEKFQQAIDSREDPVSCAFVVLMAHGREGFLKGEDGEMVKLENLFEALNNKNCQALRAKPKVYIIQACRGEQRDPGETVGGDEIVMVIKDSPQTIPTYTDALHVYSTVEGYIAYRHDQKGSCFIQTLVDVFTKRKGHILELLTEVTRRMAEAELVQEGKARKTNPEIQSTLRKRLYLQ

SEQ ID NO: 118 - protein, 178 aa, Homo sapiens
MGWGNPIIAVFRTPFAPWLQFHWSAPFSAWLGTVLTHLHSSQQRSGTTVCPPCDNELKSEAIIEHLCASEFALRMKIKEVKKENGDKKIVPKKKKPLKLGPIKKKDLKKLVLYLKNGADCPCHQLDNLSHHFLIMGRKVKSQYLLTAIHKWDKKNKEFKNFMKKMKNHECPTFQSVFK

SEQ ID NO: 119 - protein, 457 aa, Homo sapiens
MRSAAVLALLLCAGQVTALPVNSPMNKGDTEVMKCIVEVISDTLSKPSPMPVSQECFETLRGDERILSILRHQNLLKELQDLALQGAKERAHQQKKHSGFEDELSEVLENQSSQAELKEAVEEPSSKDVMEKREDSKEAEKSGEATDGARPQALPEPMQESKAEGNNQAPGEEEEEEEEATNTHPPASLPSQKYPGPQAEGDSEGLSQGLVDREKGLSAEPGWQAKREEEEEEEEEAEAGEEAVPEEEGPTVVLNPHPSLGYKEIRKGESRSEALAVDGAGKPGAEEAQDPEGKGEQEHSQQKEEEEEMAVVPQGLFRGGKSGELEQEEERLSKEWEDSKRWSKMDQLAKELTAEKRLEGQEEEEDNRDSSMKLSFRARAYGFRGPGPQLRRGWRPSREEDSLEAGLPLQVRGYPEEKKEEEGSANRRPEDQELESLSAIEAELEKVAHQLQALRRG

SEQ ID NO: 120 - protein, 360 aa, Homo sapiens
MIPLLLAALLCVPAGALTCYGDSGQPVDWFVVYKLPALRGSGEAAQRGLQYKYLDESSGGWRDGRALINSPEGAVGRSLQPLYRSNTSQLAFLLYNDQPPQPSKAQDSSMRGHTKGVLLLDHDGGFWLVHSVPNFPPPASSAAYSWPHSACTYGQTLLCVSFPFAQFSKMGKQLTYTYPWVYNYQLEGIFAQEFPDLENVVKGHHVSQEPWNSSITLTSQAGAVFQSFAKFSKFGDDLYSGWLAAALGTNLQVQFWHKTVGILPSNCSDIWQVLNVNQIAFPGPAGPSFNSTEDHSKWCVSPKGPWTCVGDMNRNQGEEQRGGGTLCAQLPALWKAFQPLVKNYQPCNGMARKPSRAYKI

SEQ ID NO: 121 - protein, 1054 aa, Homo sapiens
MLQKREKVLLLRTFQGRTLRIVREHYLRPCVPCHSPLCPQPAACSHDGKLLSSDVTHYVIPDWKVVQDYLEILEFPELKGIIFMQTACQAVQHQRGRRQYNKLRNLLKDARHDCILFANEFQQCCYLPRERGESMEKWQTRSIYNAAVWYYHHCQDRMPIVMVTEDEEAIQQYGSETEGVFVITFKNYLDNFWPDLKAAHELCDSILQSRRERENESQESHGKEYPEHLPLEVLEAGIKSGRYIQGILNVNKHRAQIEAFVRLQGASSKDSDLVSDILIHGMKARNRSIHGDVVVVELLPKNEWKGRTVALCENDCDDKASGESPSEPMPTGRVVGILQKNWRDYVVTFPSKEEVQSQGKNAQKILVTPWDYRIPKIRISTQQAETLQDFRVVVRIDSWESTSVYPNGHFVRVLGRIGDLEGEIATILVENSISVIPFSEAQMCEMPVNTPESPWKVSPEEEQKRKDLRKSHLVFSIDPKGCEDVDDTLSVRTLNNGNLELGVHIADVTHFVAPNSYIDIEARTRATTYYLADRRYDMLPSVLSADLCSLLGGVDRYAVSIMWELDKASYEIKKVWYGRTIIRSAYKLFYEAAQELLDGNLSVVDDIPEFKDLDEKSRQAKLEELVWAIGKLTDIARHVRAKRDGCGALELEGVEVCVQLDDKKNIHDLIPKQPLEVHETVAECMILANHWVAKKIWESFPHQALLRQHPPPHQEFFSELRECAKAKGFFIDTRSNKTLADSLDNANDPHDPIVNRLLRSMATQAMSNALYFSTGSCAEEEFHHYGLALDKYTHFTSPIRRYSDIVVHRLLMAAISKDKKMEIKGNLFSNKDLEELCRHINNRNQAAQHSQKQSTELFQCMYFKDKDPATEERCISDGVIYSIRTNGVLLFIPRFGIKGAAYLKNKDGLVISCGPDSCSEWKPGSLQRFQNKITSTTTDGESVTFHLFDHVTVRISIQASRCHSDTIRLEIISNKPYKIPNTELIHQSSPLLKSELVKEVTKSVEEAQLAQEVKVNIIQEEYQEYRQTKGRSLYTLLEEIRDLALLDVSNNYGI

SEQ ID NO: 122 - protein, 331 aa, Homo sapiens
MRCCHICKLPGRVMGIRVLRLSLVVILVLLLVAGALTALLPSVKEDKMLMLRREIKSQGKSTMDSFTLIMQTYNRTDLLLKLLNHYQAVPNLHKVIVVWNNIGEKAPDELWNSLGPHPIPVIFKQQTANRMRNRLQVFPELETNAVLMVDDDTLISTPDLVFAFSVWQQFPDQIVGFVPRKHVSTSSGIYSYGSFEMQAPGSGNGDQYSMVLIGASFFNSKYLELFQRQPAAVHALIDDTQNCDDIAMNFIIAKHIGKTSGIFVKPVNMDNLEKETNSGYSGMWHRAEHALQRSYCINKLVNIYDSMPLRYSNIMISQFGFPYANYKKKKK

SEQ ID NO: 123 - protein, 540 aa, Homo sapiens
MGTTARAALVLTYLAVASAASEGGFTATGQRQLRPEHFQEVGYAAPPSPPLSRSLPMDHPDSSQHGPPFEGQSQVQPPPSQEATPLQQEKLLPAQLPAEKEVGPPLPQEAVPLQKELPSLQHPNEQKEGTPAPFGDQSHPEPESWNAAQHCQQDRSQGGWGHRLDGFPPGRPSPDNLNQICLPNRQHVVYGPWNLPQSSYSHLTRQGETLNFLEIGYSRCCHCRSHTNRLECAKLVWEEAMSRFCEAEFSVKTRPHWCCTRQGEARFSCFQEEAPQPHYQLRACPSHQPDISSGLELPFPPGVPTLDNIKNICHLRRFRSVPRNLPATDPLQRELLALIQLEREFQRCCRQGNNHTCTWKAWEDTLDKYCDREYAVKTHHHLCCRHPPSPTRDECFARRAPYPNYDRDILTIDIGRVTPNLMGHLCGNQRVLTKHKHIPGLIHNMTARCCDLPFPEQACCAEEEKLTFINDLCGPRRNIWRDPALCCYLSPGDEQVNCFNINYLRNVALVSGDTENAKGQGEQGSTGGTNISSTSEPKEE

SEQ ID NO: 124 - protein, 126 aa, Homo sapiens
MKHLWFFLLLVAAPRWVLSQVQLQESGPGLVKPSETLSLTCTVSGGSISSYYWSWIRQPPGKGLEWIGYIYYSGSTNYNPSLKSRVTISVDTSKNQFSLKLSSVTAADTAVYYCARDTVRGDVSSL

SEQ ID NO: 125 - protein, 528 aa, Homo sapiens
MLLPLLLLLPMCWAVEVKRPRGVSLTNHHFYDESKPFTCLDGSATIPFDQVNDDYCDCKDGSDEPGTAACPNGSFHCTNTGYKPLYIPSNRVNDGVCDCCDGTDEYNSGVICENTCKEKGRKERESLQQMAEVTREGFRLKKILIEDWKKAREEKQKKLIELQAGKKSLEDQVEMLRTVKEEAEKPEREAKEQHQKLWEEQLAAAKAQQEQELAADAFKELDDDMDGTVSVTELQTHPELDTDGDGALSEAEAQALLSGDTQTDATSFYDRVWAAIRDKYRSEALPTDLPAPSAPDLTEPKEEQPPVPSSPTEEEEEEEEEEEEEAEEEEEEEDSEEAPPPLSPPQPASPAEEDKMPPYDEQTQAFIDAAQEARNKFEEAERSLKDMEESIRNLEQEISFDFGPNGEFAYLYSQCYELTTNEYVYRLCPFKLVSQKPKLGGSPTSLGTWGSWIGPDHDKFSAMKYEQGTGCWQGPNRSTTVRLLCGKETMVTSTTEPSRCEYLMELMTPAACPEPPPEAPTEDDHDEL

SEQ ID NO: 126 - protein, 361 aa, Homo sapiens
MAGGRHRRVVGTLHLLLLVAALPWASRGVSPSASAWPEEKNYHQPAILNSSALRQIAEGTSISEMWQNDLQPLLIERYPGSPGSYAARQHIMQRIQRLQADWVLEIDTFLSQTPYGYRSFSNIISTLNPTAKRHLVLACHYDSKYFSHWNNRVFVGATDSAVPCAMMLELARALDKKLLSLKTVSDSKPDLSLQLIFFDGEEAFLHWSPQDSLYGSRHLAAKMASTPHPPGARGTSQLHGMDLLVLLDLIGAPNPTFPNFFPNSARWFERLQAIEHELHELGLLKDHSLEGRYFQNYSYGGVIQDDHIPFLRRGVPVLHLIPSPFPEVWHTMDDNEENLDESTIDNLNKILQVFVLEYLHL

SEQ ID NO: 127 - protein, 57 aa, Homo sapiens
MKFFVFALVLALMISMISADSHEKRHHGYRRKFHEKHHSHREFPFYGDYGSNYLYDN

SEQ ID NO: 128 - protein, 103 aa, Homo sapiens [sequence omitted]

SEQ ID NO: 129 - protein, 1331 aa, Homo sapiens
MQAAPRAGCGAALLLWIVSSCLCRAWTAPSTSQKCDEPLVSGLPHVAFSSSSSISGSYSPGYAKINKRGGAGGWSPSDSDHYQWLQVDFGNRKQISAIATQGRYSSSDWVTQYRMLYSDTGRNWKPYHQDGNIWAFPGNINSDGVVRHELQHPIIARYVRIVPLDWNGEGRIGLRIEVYGCSYWADVINFDGHVVLPYRFRNKKMKTLKDVIALNFKTSESEGVILHGEGQQGDYITLELKKAKLVLSLNLGSNQLGPIYGHTSVMTGSLLDDHHWHSVVIERQGRSINLTLDRSMQHFRTNGEFDYLDLDYEITFGGIPFSGKPSSSSRKNFKGCMESINYNGVNITDLARRKKLEPSNVGNLSFSCVEPYTVPVFFNATSYLEVPGRLNQDLFSVSFQFRTWNPNGLLVFSHFADNLGNVEIDLTESKVGVHINITQTKMSQIDISSGSGLNDGQWHEVRFLAKENFAILTIDGDEASAVRTNSPLQVKTGEKYFFGGFLNQMNNSSHSVLQPSFQGCMQLIQVDDQLVNLYEVAQRKPGSFANVSIDMCAIIDRCVPNHCEHGGKCSQTWDSFKCTCDETGYSGATCHNSIYEPSCEAYKHLGQTSNYYWIDPDGSGPLGPLKVYCNMTEDKVWTIVSHDLQMQTPVVGYNPEKYSVTQLVYSASMDQISAITDSAEYCEQYVSYFCKMSRLLNTPDGSPYTWWVGKANEKHYYWGGSGPGIQKCACGIERNCTDPKYYCNCDADYKQWRKDAGFLSYKDHLPVSQVVVGDTDRQGSEAKLSVGPLRCQGDRNYWNAASFPNPSSYLHFSTFQGETSADISFYFKTLTPWGVFLENMGKEDFIKLELKSATEVSFSFDVGNGPVEIVVRSPTPLNDDQWHRVTAERNVKQASLQVDRLPQQIRKAPTEGHTRLELYSQLFVGGAGGQQGFLGCIRSLRMNGVTLDLEERAKVTSGFISGCSGHCTSYGTNCENGGKCLERYHGYSCDCSNTAYDGTFCNKDVGAFFEEGMWLRYNFQAPATNARDSSSRVDNAPDQQNSHPDLAQEEIRFSFSTTKAPCILLYISSFTTDFLAVLVKPTGSLQIRYNLGGTREPYNIDVDHRNMANGQPHSVNITRHEKTIFLKLDHYPSVSYHLPSSSDTLFNSPKSLFLGKVIETGKIDQEIHKYNTPGFTGCLSRVQFNQIAPLKAALRQTNASAHVHIQGELVESNCGASPLTLSPMSSATDPWHLDHLDSASADFPYNPGQGQAIRNGVNRNSAIIGGVIAVVIFTILCTLVFLIRYMFRHKGTYHTNEAKGAESAESADAAIMNNDPNFTETIDESKKEWLI

SEQ ID NO: 130 - protein, 842 aa, Homo sapiens
MKPGGFWLHLTLLGASLPAALGWMDPGTSRGPDVGVGESQAEEPRSFEVTRREGLSSHNKLLASCGKKFCSRGSRCVLSRKTGEPECQCLEACRPSYVPVCGSDGRFYENHCKLHRAACLLGKRITVIHSKDCFLKGDTCTMAGYARLKNVLLALQTRLQPLQEGDSRQDPASQKRLLVESLFRDLDADGNGHLSSSELAQHVLKKQDLDEDLLGCSPGDLLRFDDYNSDSSLTLREFYIAFQVVQLSLAPEDRVSVTTVTVGLSTVLTCAVHGDLRPPIIWKRNGLTLNFLDLEDINDFGEDDSLYITKVTTIHMGNYTCHASGHEQLFQTHVLQVNVPPVIRVYPESQAQEPGVAASLRCHAEGIPMPRITWLKNGVDVSTQMSKQLSLLANGSELHISSVRYEDTGAYTCIAKNEVGVDEDISSLFIEDSARKTLANILWREEGLSVGNMFYVFSDDGIIVIHPVDCEIQRHLKPTEKIFMSYEEICPQREKNATQPCQWVSAVNVRNRYIYVAQPALSRVLVVDIQAQKVLQSIGVDPLPAKLSYDKSHDQVWVLSWGDVHKSRPSLQVITEASTGQSQHLIRTPFAGVDDFFIPPTNLIINHIRFGFIFNKSDPAVHKVDLETMMPLKTIGLHHHGCVPQAMAHTHLGGYFFIQCRQDSPASAARQLLVDSVTDSVLGPNGDVTGTPHTSPDGRFIVSAAADSPWLHVQEITVRGEIQTLYDLQINSGISDLAFQRSFTESNQYNIYAALHMEPDLLFPELSTGKVGMLKNLKEPPAGPAQPWGGTHRIMRDSGLFGQYLLTPARESLFLINGRQNTLRCEVSGIKGGTTVVWVGEV

SEQ ID NO: 131 - protein, 332 aa, Homo sapiens
MATLKDQLIYNLLKEEQTPQNKITVVGVGAVGMACAISILMKDLADELALVDVIEDKLKGEMMDLQHGSLFLRTPKIVSGKDYNVTANSKLVIITAGARQQEGESRLNLVQRNVNIFKFIIPNVVKYSPNCKLLIVSNPVDILTYVAWKISGFPKNRVIGSGCNLDSARFRYLMGERLGVHPLSCHGWVLGEHGDSSVPVWSGMNVAGVSLKTLHPDLGTDKDKEQWKEVHKQVVESAYEVIKLKGYTSWAIGLSVADLAESIMKNLRRVHPVSTMIKGLYGIKDDVFLSVPCILGQNGISDLVKVTLTSEEEARLKKSADTLWGIQKELQF

SEQ ID NO: 132 - protein, 1461 aa, Homo sapiens
MAAERGARRLLSTPSFWLYCLLLLGRRAPGAAAARSGSAPQSPGASIRTFTPFYFLVEPVDTLSVRGSSVILNCSAYSEPSPKIEWKKDGTFLNLVSDDRRQLLPDGSLFISNVVHSKHNKPDEGYYQCVATVESLGTIISRTAKLIVAGLPRFTSQPEPSSVYAGNNAILNCEVNADLVPFVRWEQNRQPLLLDDRVIKLPSGMLVISNATEGDGGLYRCVVESGGPPKYSDEVELKVLPDPEVISDLVFLKQPSPLVRVIGQDVVLPCVASGLPTPTIKWMKNEEALDTESSERLVLLAGGSLEISDVTEDDAGTYFCIADNGNETIEAQAELTVQAQPEFLKQPTNIYAHESMDIVFECEVTGKPTPTVKWVKNGDMVIPSDYFKIVKEHNLQVLGLVKSDEGFYQCIAENDVGNAQAGAQLIILEHAPATTGPLPSAPRDVVASLVSTRFIKLTWRTPASDPHGDNLTYSVFYTKEGIARERVENTSHPGEMQVTIQNLMPATVYIFRVMAQNKHGSGESSAPLRVETQPEVQLPGPAPNLRAYAASPTSITVTWETPVSGNGEIQNYKLYYMEKGTDKEQDVDVSSHSYTINGLKKYTEYSFRVVAYNKHGPGVSTPDVAVRTLSDVPSAAPQNLSLEVRNSKSIMIHWQPPAPATQNGQITGYKIRYRKASRKSDVTETLVSGTQLSQLIEGLDRGTEYNFRVAALTINGTGPATDWLSAETFESDLDETRVPEVPSSLHVRPLVTSIVVSWTPPENQNIVVRGYAIGYGIGSPHAQTIKVDYKQRYYTIENLDPSSHYVITLKAFNNVGEGIPLYESAVTRPHTDTSEVDLFVINAPYTPVPDPTPMMPPVGVQASILSHDTIRITWADNSLPKHQKITDSRYYTVRWKTNIPANTKYKNANATTLSYLVTGLKPNTLYEFSVMVTKGRRSSTWSMTAHGTTFELVPTSPPKDVTVVSKEGKPKTIIVNWQPPSEANGKITGYIIYYSTDVNAEIHDWVIEPVVGNRLTHQIQELTLDTPYYFKIQARNSKGMGPMSEAVQFRTPKADSSDKMPNDQASGSGGKGSRLPDLGSDYKPPMSGSNSPHGSPTSPLDSNMLLVIIVSVGVITIVVVVIIAVFCTRRTTSHQKKKRAACKSVNGSHKYKGNSKDVKPPDLWIHHERLELKPIDKSPDPNPIMTDTPIPRNSQDITPVDNSMDSNIHQRRNSYRGHESEDSMSTLAGRRGMRPKMMMPFDSQPPQPVISAHPIHSLDNPHHHFHSSSLASPARSHLYHPGSPWPIGTSMSLSDRANSTESVRNTPSTDTMPASSSQTCCTDHQDPEGATSSSYLASSQEEDSGQSLPTAHVRPSHPLKSFAVPAIPPPGPPTYDPALPSTPLLSQQALNHHIHSVKTASIGTLGRSRPPMPVVVPSAPEVQETTRMLEDSESSYEPDELTKEMAHLEGLMKDLNAITTA

SEQ ID NO: 133 - protein, 1257 aa, Homo sapiens
MVVALRYVWPLLLCSPCLLIQIPEEYEGHHVMEPPVITEQSPRRLVVFPTDDISLKCEASGKPEVQFRWTRDGVHFKPKEELGVTVYQSPHSGSFTITGNNSNFAQRFQGIYRCFASNKLGTAMSHEIRLMAEGAPKWPKETVKPVEVEEGESVVLPCNPPPSAEPLRIYWMNSKILHIKQDERVTMGQNGNLYFANVLTSDNHSDYICHAHFPGTRTIIQKEPIDLRVKATNSMIDRKPRLLFPTNSSSHLVALQGQPLVLECIAEGFPTPTIKWLRPSGPMPADRVTYQNHNKTLQLLKVGEEDDGEYRCLAENSLGSARHAYYVTVEAAPYWLHKPQSHLYGPGETARLDCQVQGRPQPEVTWRINGIPVEELAKDQKYRIQRGALILSNVQPSDTMVTQCEARNRHGLLLANAYIYVVQLPAKILTADNQTYMAVQGSTAYLLCKAFGAPVPSVQWLDEDGTTVLQDERFFPYANGTLGIRDLQANDTGRYFCLAANDQNNVTIMANLKVKDATQITQGPRSTIEKKGSRVTFTCQASFDPSLQPSITWRGDGRDLQELGDSDKYFIEDGRLVIHSLDYSDQGNYSCVASTELDVVESRAQLLVVGSPGPVPRLVLSDLHLLTQSQVRVSWSPAEDHNAPIEKYDIEFEDKEMAPEKWYSLGKVPGNQTSTTLKLSPYVHYTFRVTAINKYGPGEPSPVSETVVTPEAAPEKNPVDVKGEGNETTNMVITWKPLRWMDWNAPQVQYRVQWRPQGTRGPWQEQIVSDPFLVVSNTSTFVPYEIKVQAVNSQGKGPEPQVTIGYSGEDYPQAIPELEGIEILNSSAVLVKWRPVDLAQVKGHLRGYNVTYWREGSQRKHSKRHIHKDHVVVPANTTSVILSGLRPYSSYHLEVQAFNGRGSGPASEFTFSTPEGVPGHPEALHLECQSNTSLLLRWQPPLSHNGVLTGYVLSYHPLDEGGKGQLSFNLRDPELRTHNLTDLSPHLRYRFQLQATTKEGPGEAIVREGGTMALSGISDFGNISATAGENYSVVSWVPKEGQCNFRFHILFKALGEEKGGASLSPQYVSYNQSSYTQWDLQPDTDYEIHLFKERMFRHQMAVKTNGTGRVRLPPAGFATEGWFIGFVSAIILLLLVLLILCFIKRSKGGKYSVKDKEDTQVDSEARPMKDETFGEYRSLESDNEEKAFGSSQPSLNGDIKPLGSDDSLADYGGSVDVQFNEDGSFIGQYSGKKEKEAAGGNDSSGATSPINPAVALE

SEQ ID NO: 134 - protein, 1712 aa, Homo sapiens
MASGSRWRPTPPPLLLLLLLALAARADGLEFGGGPGQWARYARWAGAASSGELSFSLRTNATRALLLYLDDGGDCDFLELLLVDGRLRLRFTLSCAEPATLQLDTPVADDRWHMVLLTRDARRTALAVDGEARAAEVRSKRREMQVASDLFVGGIPPDVRLSALTLSTVKYEPPFRGLLANLKLGERPPALLGSQGLRGATADPLCAPARNPCANGGLCTVLAPGEVGCDCSHTGFGGKFCSEEEHPMEGPAHLTLNSEVGSLLFSEGGAGRGGAGDVHQPTKGKEEFVATFKGNEFFCYDLSHNPIQSSTDEITLAFRTLQRNGLMLHTGKSADYVNLSLKSGAVWLVINLGSGAFEALVEPVNGKFNDNAWHDVRVTRNLRQHAGIGHAMVNKLHYLVTISVDGILTTTGYTQEDYTMLGSDDFFYIGGSPNTADLPGSPVSNNFMGCLKDVVYKNNDFKLELSRLAKEGDPKMKLQGDLSFRCEDVAALDPVTFESPEAFVALPRWSAKRTGSISLDFRTTEPNGLLLFSQGRRAGGGAGSHSSAQRADYFAMELLDGHLYLLLDMGSGGIKLRASSRKVNDGEWCHVDFQRDGRKGSISVNSRSTPFLATGDSEILDLESELYLGGLPEGGRVDLPLPPEVWTAALRAGYVGCVRDLFIDGRSRDLRGLAEAQGAVGVAPFCSRETLKQCASAPCRNGGVCREGWNRFICDCIGTGFLGRVCEREATVLSYDGSMYMKIMLPNAMHTEAEDVSLRFMSQRAYGLMMATTSRESADTLRLELDGGQMKLTVNLDCLRVGCAPSKGPETLFAGHKLNDNEWHTVRVVRRGKSLQLSVDNVTVEGQMAGAHMRLEFHNIETGIMTERRFISVVPSNFIGHLSGLVFNGQPYMDQCKDGDITYCELNARFGLRAIVADPVTFKSRSSYLALATLQAYASMHLFFQFKTTAPDGLLLFNSGNGNDFIVIELVKGYIHYVFDLGNGPSLMKGNSDKPVNDNQWHNVVVSRDPGNVHTLKIDSRTVTQHSNGARNLDLKGELYIGGLSKNMFSNLPKLVASRDGFQGCLASVDLNGRLPDLIADALHRIGQVERGCDGPSTTCTEESCANQGVCLQQWDGFTCDCTMTSYGGPVCNDPGTTYIFGKGGALITYTWPPNDRPSTRMDRLAVGFSTHQRSAVLVRVDSASGLGDYLQLHIDQGTVGVIFNVGTDDITIDEPNAIVSDGKYHVVRFTRSGGNATLQVDSWPVNERYPAGNFDNERLAIARQRIPYRLGRVVDEWLLDKGRQLTIFNSQAAIKIGGRDQGRPFQGQVSGLYYNGLKVLALAAESDPNVRTEGHLRLVGEGPSVLLSAETTATTLLADMATTIMETTTTMATTTTRRGRSPTLRDSTTQNTDDLLVASAECPSDDEDLEECEPSTGGELILPIITEDSLDPPPVATRSPFVPPPPTFYPFLTGVGATQDTLPPPAARRPPSGGPCQAERDDSDCEEPIEASGFASGEVFDSSLPPTDDEDFYTTFPLVTDRTTLLSPRKPAPRPNLRTDGATGAPGVLFAPSAPAPNLPAGKMNHRDPLQPLLENPPLGPGAPTSFEPRRPPPLRPGVTSAPGFPHLPTANPTGPGERGPPGAVEVIRESSSTTGMVVGIVAAAALCILILLYAMYKYRNRDEGSYQVDQSRNYISNSAQSNGAVVKEKAPAAPKTPSKAKKNKDKEYYV

SEQ ID NO: 135 - protein, 974 aa, Homo sapiens
MAGRVPSLLVLLVFPSSCLAFRSPLSVFKRFKETTRPFSNECLGTTRPVVPIDSSDFALDIRMPGVTPKQSDTYFCMSMRIPVDEEAFVIDFKPRASMDTVHHMLLFGCNMPSSTGSYWFCDEGTCTDKANILYAWARNAPPTRLPKGVGFRVGGETGSKYFVLQVHYGDISAFRDNNKDCSGVSLHLTRLPQPLIAGMYLMMSVDTVIPAGEKVVNSDISCHYKNYPMHVFAYRVHTHHLGKVVSGYRVRNGQWTLIGRQSPQLPQAFYPVGHPVDVSFGDLLAARCVFTGEGRTEATHIGGTSSDEMCNLYIMYYMEAKHAVSFMTCTQNVAPDMFRTIPPEANIPIPVKSDMVMMHEHHKETEYKDKIPLLQQPKREEEEVLDQGDFYSLLSKLLGEREDVVHVHKYNPTEKAESESDLVAEIANVVQKKDLGRSDAREGAEHERGNAILVRDRIHKFHRLVSTLRPPESRVFSLQQPPPGEGTWEPEHTGDFHMEEALDWPGVYLLPGQVSGVALDPKNNLVIFHRGDHVWDGNSFDSKFVYQQIGLGPIEEDTILVIDPNNAAVLQSSGKNLFYLPHGLSIDKDGNYWVTDVALHQVFKLDPNNKEGPVLILGRSMQPGSDQNHFCQPTDVAVDPGTGAIYVSDGYCNSRIVQFSPSGKFITQWGEESSGSSPLPGQFTVPHSLALVPLLGQLCVADRENGRIQCFKTDTKEFVREIKHSSFGRNVFAISYIPGLLFAVNGKPHFGDQEPVQGFVMNFSNGEIIDIFKPVRKHFDMPHDIVASEDGTVYIGDAHTNTVWKFTLTEKLEHRSVKKAGIEVQEIKEAEAVVETKMENKPTSSELQKMQEKQKLIKEPGSGVPVVLITTLLVIPVVVLLAIAIFIRWKKSRAFGADSEHKLETSSGRVLGRFRGKGSGGLNLGNFFASRKGYSRKGFDRLSTEGSDQEKEDDGSESEEEYSAPLPALAPSSS

SEQ ID NO: 136 - protein, 921 aa, Homo sapiens
MKTCWKIPVFFFVCSFLEPWASAAVKRRPRFPVNSNSNGGNELCPKIRIGQDDLPGFDLISQFQVDKAASRRAIQRVVGSATLQVAYKLGNNVDFRIPTRNLYPSGLPEEYSFLTTFRMTGSTLKKNWNIWQIQDSSGKEQVGIKINGQTQSVVFSYKGLDGSLQTAAFSNLSSLFDSQWHKIMIGVERSSATLFVDCNRIESLPIKPRGPIDIDGFAVLGKLADNPQVSVPFELQWMLIHCDPLRPRRETCHELPARITPSQTTDERGPPGEQGPPGPPGPPGVPGIDGIDGDRGPKGPPGPPGPAGEPGKPGAPGKPGTPGADGLTGPDGSPGSIGSKGQKGEPGVPGSRGFPGRGIPGPPGPPGTAGLPGELGRVGPVGDPGRRGPPGPPGPPGPRGTIGFHDGDPLCPNACPPGRSGYPGLPGMRGHKGAKGEIGEPGRQGHKGEEGDQGELGEVGAQGPPGAQGLRGITGIVGDKGEKGARGLDGEPGPQGLPGAPGDQGQRGPPGEAGPKGDRGAEGARGIPGLPGPKGDTGLPGVDGRDGIPGMPGTKGEPGKPGPPGDAGLQGLPGVPGIPGAKGVAGEKGSTGAPGKPGQMGNSGKPGQQGPPGEVGPRGPQGLPGSRGELGPVGSPGLPGKLGSLGSPGLPGLPGPPGLPGMKGDRGVVGEPGPKGEQGASGEEGEAGERGELGDIGLPGPKGSAGNPGEPGLRGPEGSRGLPGVEGPRGPPGPRGVQGEQGATGLPGVQGPPGRAPTDQHIKQVCMRVIQEHFAEMAASLKRPDSGATGLPGRPGPPGPPGPPGENGFPGQMGIRGLPGIKGPPGALGLRGPKGDLGEKGERGPPGRGPNGLPGAIGLPGDPGPASYGKNGRDGERGPPGLAGIPGVPGPPGPPGLPGFCEPASCTMQAGQRAFNKGPDP

SEQ ID NO: 137 - protein, 747 aa, Homo sapiens
MRRCNSGSGPPPSLLLLLLWLLAVPGANAAPRSALYSPSDPLTLLQADTVRGAVLGSRSAWAVEFFASWCGHCIAFAPTWKALAEDVKAWRPALYLAALDCAEETNSAVCRDFNIPGFPTVRFFKAFTKNGSGAVFPVAGADVQTLRERLIDALESHHDTWPPACPPLEPAKLEEIDGFFARNNEEYLALIFEKGGSYLGREVALDLSQHKGVAVRRVLNTEANVVRKFGVTDFPSCYLLFRNGSVSRVPVLMESRSFYTAYLQRLSGLTREAAQTTVAPTTANKIAPTVWKLADRSKIYMADLESALHYILRIEVGRFPVLEGQRLVALKKFVAVLAKYFPGRPLVQNFLHSVNEWLKRQKRNKIPYSFFKTALDDRKEGAVLAKKVNWIGCQGSEPHFRGFPCSLWVLFHFLTVQAARQNVDHSQEAAKAKEVLPAIRGYVHYFFGCRDCASHFEQMAAASMHRVGSPNAAVLWLWSSHNRVNARLAGAPSEDPQFPKVQWPPRELCSACHNERLDVPVWDVEATLNFLKAHFSPSNIILDFPAAGSAARRDVQNVAAAPELAMGALELESRNSTLDPGKPEMMKSPTNTTPHVPAEGPEASRPPKLHPGLRAAPGQEPPEHMAELQRNEQEQPLGQWHLSKRDTGAALLAESRAEKNRLWGPLEVRRVGRSSKQLVDIPEGQLEARAGRGRGQWLQVLGGGFSYLDISLCVGLYSLSFMGLLAMYTYFQAKIRALKGHAGHPAA

SEQ ID NO: 138 - protein, 1358 aa, Homo sapiens
MGADGETVVLKNMLIGVNLILLGSMIKPSECQLEVTTERVQRQSVEEEGGIANYNTSSKEQPVVFNHVYNINVPLDNLCSSGLEASAEQEVSAEDETLAEYMGQTSDHESQVTFTHRINFPKKACPCASSAQVLQELLSRIEMLEREVSVLRDQCNANCCQESAATGQLDYIPHCSGHGNFSFESCGCICNEGWFGKNCSEPYCPLGCSSRGVCVDGQCICDSEYSGDDCSELRCPTDCSSRGLCVDGECVCEEPYTGEDCRELRCPGDCSGKGRCANGTCLCEEGYVGEDCGQRQCLNACSGRGQCEEGLCVCEEGYQGPDCSAVAPPEDLRVAGISDRSIELEWDGPMAVTEYVISYQPTALGGLQLQQRVPGDWSGVTITELEPGLTYNISVYAVISNILSLPITAKVATHLSTPQGLQFKTITETTVEVQWEPFSFSFDGWEISFIPKNNEGGVIAQVPSDVTSFNQTGLKPGEEYIVNVVALKEQARSPPTSASVSTVIDGPTQILVRDVSDTVAFVEWIPPRAKVDFILLKYGLVGGEGGRTTFRLQPPLSQYSVQALRPGSRYEVSVSAVRGTNESDSATTQFTTEIDAPKNLRVGSRTATSLDLEWDNSEAEVQEYKVVYSTLAGEQYHEVLVPRGIGPTTRATLTDLVPGTEYGVGISAVMNSQQSVPATMNARTELDSPRDLMVTASSETSISLIWTKASGPIDHYRITFTPSSGIASEVTVPKDRTSYTLTDLEPGAEYIISVTAERGRQQSLESTVDAFTGFRPISHLHFSHVTSSSVNITWSDPSPPADRLILNYSPRDEEEEMMEVSLDATKRHAVLMGLQPATEYIVNLVAVHGTVTSEPIVGSITTGIDPPKDITISNVTKDSVMVSWSPPVASFDYYRVSYRPTQVGRLDSSVVPNTVTEFTITRLNPATEYEISLNSVRGREESERICTLVHTAMDNPVDLIATNITPTEALLQWKAPVGEVENYVIVLTHFAVAGETILVDGVSEEFRLVDLLPSTHYTATMYATNGPLTSGTISTNFSTLLDPPANLTASEVTRQSALISWQPPRAEIENYVLTYKSTDGSRKELIVDAEDTWIRLEGLLENTDYTVLLQAAQDTTWSSITSTAFTTGGRVFPHPQDCAQHLMNGDTLSGVYPIFLNGELSQKLQVYCDMTTDGGGWIVFQRRQNGQTDFFRKWADYRVGFGNVEDEFWLGLDNIHRITSQGRYELRVDMRDGQEAAFASYDRFSVEDSRNLYKLRIGSYNGTAGDSLSYHQGRPFSTEDRDNDVAVTNCAMSYKGAWWYKNCHRTNLNGKYGESRHSQGINWYHWKGHEFSIPFVEMKMRPYNHRLMAGRKRQSLQF

SEQ ID NO: 139 - protein, 1541 aa, Homo sapiens
MSSTLHSVFFTLKVSILLGSLLGLCLGLEFMGLPNQWARYLRWDASTRSDLSFQFKTNVSTGLLLYLDDGGVCDFLCLSLVDGRVQLRFSMDCAETAVLSNKQVNDSSWHFLMVSRDRLRTVLMLDGEGQSGELQPQRPYMDVVSDLFLGGVPTDIRPSALTLDGVQAMPGFKGLILDLKYGNSEPRLLGSRGVQMDAEGPCGERPCENGGICFLLDGHPTCDCSTTGYGGKLCSEGSSGDPCLSHLMMSEQAREENVATFRGSEYLCYDLSQNPIQSSSDEITLSFKTWQRNGLILHTGKSADYVNLALKDGAVSLVINLGSGAFEAIVEPVNGKFNDNAWHDVKVTRNLRQVTISVDGILTTTGYTQEDYTMLGSDDFFYVGGSPSTADLPGSPVSNNFMGCLKEVVYKNNDIRLELSRLARIADTKMKIYGEVVFKCENVATLDPINFETPEAYISLPKWNTKRMGSISFDFRTTEPNGLILFTHGKPQERKDARSQKNTKVDFFAVELLDGNLYLLLDMGSGTIKVKATQKKANDGEWYHVDIQRDGRSGTISVNSRRTPFTASGESEILDLEGDMYLGGLPENRAGLILPTELWTAMLNYGYVGCIRDLFIDGRSKNIRQLAEMQNAAGVKSSCSRMSAKQCDSYPCKNNAVCKDGWNRFICDCTGTGYWGRTCEREASILSYDGSMYMKIIMPMVMHTEAEDVSFRFMSQRAYGLLVATTSRDSADTLRLELDGGRVKLMVNLDCIRINCNSSKGPETLYAGQKLNDNEWHTVRVVRRGKSLKLTVDDDVAEGTMVGDHTRLEFHNIETGIMTEKRYISVVPSSFIGHLQSLMFNGLLYIDLCKNGDIDYCELKARFGLRNIIADPVTFKTKSSYLSLATLQAYTSMHLFFQFKTTSPDGFILFNSGDGNDFIAVELVKGYIHYVFDLGNGPNVIKGNSDRPLNDNQWHNVVITRDNSNTHSLKVDTKVVTQVINGAKNLDLKGDLYMAGLAQGMYSNLPKLVASRDGFQGCLASVDLNGRLPDLINDALHRSGQIERGCEGPSTTCQEDSCANQGVCMQQWEGFTCDCSMTSYSGNQCNDPGATYIFGKSGGLILYTWPANDRPSTRSDRLAVGFSTTVKDGILVRIDSAPGLGDFLQLHIEQGKIGVVFNIGTVDISIKEERTPVNDGKYHVVRFTRNGGNATLQVDNWPVNEHYPTGRQLTIFNTQAQIAIGGKDKGRLFQGQLSGLYYDGLKVLNMAAENNPNIKINGSVRLVGEVPSILGTTQTTSMPPEMSTTVMETTTTMATTTTRKNRSTASIQPTSDDLVSSAECSSDDEDFVECEPSTDKSLSTSIFEGGYKAHAPKWESKDFRPNKVSETSRTTTTSLSPELIRFTASSSSGMVPKLPAGKMNNRDLKPQPDIVLLPLPTAYELDSTKLKSPLITSPMFRNVPTANPTEPGIRRVPGASEVIRESSSTTGMVVGIVAAAALCILILLYAMYKYRNRDEGSYQVDETRNYISNSAQSNGTLMKEKQQSSKSGHKKQKNKDREYYV

SEQ ID NO: 140 - protein, 493 aa, Homo sapiens; identical to SEQ ID NO: 44

SEQ ID NO: 141 - protein, 436 aa, Homo sapiens
MLKVSAVLCVCAAAWCSQSLAAAAAVAAAGGRSDGGNFLDDKQWLTTISQYDKEVGQWNKFRDEVEDDYFRTWSPGKPFDQALDPAKDPCLKMKCSRHKVCIAQDSQTAVCISHRRLTHRMKEAGVDHRQWRGPILSTCKQCPVVYPSPVCGSDGHTYSFQCKLEYQACVLGKQISVKCEGHCPCPSDKPTSTSRNVKRACSDLEFREVANRLRDWFKALHESGSQNKKTKTLLRPERSRFDTSILPICKDSLGWMFNRLDTNYDLLLDQSELRSIYLDKNEQCTKAFFNSCDTYKDSLISNNEWCYCFQRQQDPPCQTELSNIQKRQGVKKLLGQYIPLCDEDGYYKPTQCHGSVGQCWCVDRYGNEVMGSRINGVADCAIDFEISGDFASGDFHEWTDDEDDEDDIMNDEDEIEDDDEDEGDDDDGGDDHDVYI

SEQ ID NO: 142 - protein, 249 aa, Homo sapiens
MAPSRKFFVGGNWKMNGRKQSLGELIGTLNAAKVPADTEVVCAPPTAYIDFARQKLDPKIAVAAQNCYKVTNGAFTGEISPGMIKDCGATWVVLGHSERRHVFGESDELIGQKVAHALAEGLGVIACIGEKLDEREAGITEKVVFEQTKVIADNVKDWSKVVLAYEPVWAIGTGKTATPQQAQEVHEKLRGWLKSNVSDAVAQSTRIIYGGSVTGATCKELASQPDVDGFLVGGASLKPEFVDIINAKQ

SEQ ID NO: 143 - protein, 1024 aa, Homo sapiens
MPAARPPAAGLRGISLFLALLLGSPAAALERDALPEGDASPLGPYLLPSGAPERGSPGKEHPEERVVTAPPSSSQSAEVLGELVLDGTAPSAHHDIPALSPLLPEEARPKHALPPKKKLPSLKQVNSARKQLRPKATSAATVQRAGSQPASQGLDLLSSSTEKPGPPGDPDPIVASEEASEVPLWLDRKESAVPTTPAPLQISPFTSQPYVAHTLPQRPEPGEPGPDMAQEAPQEDTSPMALMDKGENELTGSASEESQETTTSTIITTTVITTEQAPALCSVSFSNPEGYIDSSDYPLLPLNNFLECTYNVTVYTGYGVELQVKSVNLSDGELLSIRGVDGPTLTVLANQTLLVEGQVIRSPTNTISVYFRTFQDDGLGTFQLHYQAFMLSCNFPRRPDSGDVTVMDLHSGGVAHFHCHLGYELQGAKMLTCINASKPHWSSQEPICSAPCGGAVHNATIGRVLSPSYPENTNGSQFCIWTIEAPEGQKLHLHFERLLLHDKDRMTVHSGQTNKSALLYDSLQTESVPFEGLLSEGNTIRIEFTSDQARAASTFNIRFEAFEKGHCYEPYIQNGNFTTSDPTYNIGTIVEFTCDPGHSLEQGPAIIECINVRDPYWNDTEPLCRAMCGGELSAVAGVVLSPNWPEPYVEGEDCIWKIHVGEEKRIFLDIQFLNLSNSDILTIYDGDEVMPHILGQYLGNSGPQKLYSSTPDLTIQFHSDPAGLIFGKGQGFIMNYIEVSRNDSCSDLPEIQNGWKTTSHTELVRGARITYQCDPGYDIVGSDTLTCQWDLSWSSDPPFCEKIMYCTDPGEVDHSTRLISDPVLLVGTTIQYTCNPGFVLEGSSLLTCYSRETGTPIWTSRLPHCVSEESLACDNPGLPENGYQILYKRLYLPGESLTFMCYEGFELMGEVTIRCILGQPSHWNGPLPVCKVNQDSFEHALEVAEAAAETSLEGGNMALAIFIPVLIISLLLGGAYIYITRCRYYSNLRLPLMYSHPYSQITVETEFDNPIYETGETREYEVSI

SEQ ID NO: 144 - protein, 1139 aa, Homo sapiens
MKLKKQVTVCGAAIFCVAVFSLYLMLDRVQHDPTRHQNGGNFPRSQISVLQNRIEQLEQLLEENHEIISHIKDSVLELTANAEGPPAMLPYYTVNGSWVVPPEPRPSFFSISPQDCQFALGGRGQKPELQMLTVSEELPFDNVDGGVWRQGFDISYDPHDWDAEDLQVFVVPHSHNDPGWIKTFDKYYTEQTQHILNSMVSKLQEDPRRRFLWAEVSFFAKWWDNINVQKRAAVRRLVGNGQLEIATGGWVMPDEANSHYFALIDQLIEGHQWLERNLGATPRSGWAVDPFGYSSTMPYLLRRANLTSMLIQRVHYAIKKHFAATHSLEFMWRQTWDSDSSTDIFCHMMPFYSYDVPHTCGPDPKICCQFDFKRLPGGRINCPWKVPPRAITEANVAERAALLLDQYRKKSQLFRSNVLLVPLGDDFRYDKPQEWDAQFFNYQRLFDFFNSRPNLHVQAQFGTLSDYFDALYKRTGVEPGARPPGFPVLSGDFFSYADREDHYWTGYYTSRPFYKSLDRVLEAHLRGAEVLYSLAAAHARRSGLAGRYPLSDFTLLTEARRTLGLFQHHDAITGTAKEAVVVDYGVRLLRSLVNLKQVIIHAAHYLVLGDKETYHFDPEAPFLQVDDTRLSHDALPERTVIQLDSSPRFVVLFNPLEQERFSMVSLLVNSPRVRVLSEEGQPLAVQISAHWSSATEAVPDVYQVSVPVRLPALGLGVLQLQLGLDGHRTLPSSVRIYLHGRQLSVSRHEAFPLRVIDSGTSDFALSNRYMQVWFSGLTGLLKSIRRVDEEHEQQVDMQVLVYGTRTSKDKSGAYLFLPDGEASPTSPRSPPCCVSLKALSSQRWLRTMSTFTRRSGFTICQGWRGCLWTYHPWWTSGTTSTRSWPCTSIQTSTARVQPRRYLKKLPLQANFYPMPVMAYIQDAQKRLTLHTAQALGVSSLKDGQLEVILDRRLMQDDNRGLGQGLKDNKRTCNRFRLLLERRTVGSEVQDSHSTSYPSLLSHLTSMYLNAPALALPVARMQLPGPGLRSFHPLASSLPCDFHLLNLRTLQAEEDTLPSAETALILHRKGFDCGLEAKNLGFNCTTSQGKVALGSLFHGLDVVFLQPTSLTLLYPLASPSNSTDVYLEPMEIATFRLRLG

SEQ ID NO: 145 - protein, 550 aa, Homo sapiens
MPPPRTGRGLLWLGLVLSSVCVALGSETQANSTTDALNVLLIIVDDLRPSLGCYGDKLVRSPNIDQLASHSLLFQNAFAQQAVCAPSRVSFLTGRRPDTTRLYDFNSYWRVHAGNFSTIPQYFKENGYVTMSVGKVFHPGISSNHTDDSPYSWSFPPYHPSSEKYENTKTCRGPDGELHANLLCPVDVLDVPEGTLPDKQSTEQAIQLLEKMKTSASPFFLAVGYHKPHIPFRYPKEFQKLYPLENITLAPDPEVPDGLPPVAYNPWMDIRQREDVQALNISVPYGPIPVDFQRKIRQSYFASVSYLDTQVGRLLSALDDLQLANSTIIAFTSDHGWALGEHGEWAKYSNFDVATHVPLIFYVPGRTASLPEAGEKLFPYLDPFDSASQLMEPGRQSMDLVELVSLFPTLAGLAGLQVPPRCPVPSFHVELCREGKNLLKHFRFRDLEEDPYLPGNPRELIAYSQYPRPSDIPQWNSDKPSLKDIKIMGYSIRTIDYRYTVWVGFNPDEFLANFSDIHAGELYFVDSDPLQDHNMYNDSQGGDLFQLLMP

SEQ ID NO: 146 - protein, 524 aa, Homo sapiens
MYALFLLASLLGAALAGPVLGLKECTRGSAVWCQNVKTASDCGAVKHCLQTVWNKPTVKSLPCDICKDVVTAAGDMLKDNATEEEILVYLEKTCDWLPKPNMSASCKEIVDSYLPVILDIIKGEMSRPGEVCSALNLCESLQKHLAELNHQKQLESNKIPELDMTEVVAPFMANIPLLLYPQDGPRSKPQPKDNGDVCQDCIQMVTDIQTAVRTNSTFVQALVEHVKEECDRLGPGMADICKNYISQYSEIAIQMMMHMQPKEICALVGFCDEVKEMPMQTLVPAKVASKNVIPALELVEPIKKHEVPAKSDVYCEVCEFLVKEVTKLIDNNKTEKEILDAFDKMCSKLPKSLSEECQEVVDTYGSSILSILLEEVSPELVCSMLHLCSGTRLPALTVHVTQPKDGGFCEVCKKLVGYLDRNLEKNSTKQEILAALEKGCSFLPDPYQKQCDQFVAEYEPVLIEILVEVMDPSFVCLKIGACPSAHKPLLGTEKCIWGPSYWCQNTETAAQCNAVEHCKRHVWN

SEQ ID NO: 147 - protein, 4289 aa, Homo sapiens
MMPAQYALTSSLVLLVLLSTARAGPFSSRSNVTLPAPRPPPQPGGHTVGAGVGSPSSQLYEHTVEGGEKQVVFTHRINLPPSTGCGCPPGTEPPVLASEVQALRVRLEILEELVKGLKEQCTGGCCPASAQAGTGQTDVRTLCSLHGVFDLSRCTCSCEPGWGGPTCSDPTDAEIPPSSPPSASGSCPDDCNDQGRCVRGRCVCFPGYTGPSCGWPSCPGDCQGRGRCVQGVCVCRAGFSGPDCSQRSCPRGCSQRGRCEGGRCVCDPGYTGDDCGMRSCPRGCSQRGRCENGRCVCNPGYTGEDCGVRSCPRGCSQRGRCKDGRCVCDPGYTGEDCGTRSCPWDCGEGGRCVDGRCVCWPGYTGEDCSTRTCPRDCRGRGRCEDGECICDTGYSGDDCGVRSCPGDCNQRGRCEDGRCVCWPGYTGTDCGSRACPRDCRGRGRCENGVCVCNAGYSGEDCGVRSCPGDCRGRGRCESGRCMCWPGYTGRDCGTRACPGDCRGRGRCVDGRCVCNPGFTGEDCGSRRCPGDCRGHGLCEDGVCVCDAGYSGEDCSTRSCPGGCRGRGQCLDGRCVCEDGYSGEDCGVRQCPNDCSQHGVCQDGVCICWEGYVSEDCSIRTCPSNCHGRGRCEEGRCLCDPGYTGPTCATRMCPADCRGRGRCVQGVCLCHVGYGGEDCGQEEPPASACPGGCGPRELCRAGQCVCVEGFRGPDCAIQTCPGDCRGRGECHDGSCVCKDGYAGEDCGEARVPSSASAYDQRGLAPGQEYQVTVRALRGTSWGLPASKTITTMIDGPQDLRVVAVTPTTLELGWLRPQAEVDRFVVSYVSAGNQRVRLEVPPEADGTLLTDLMPGVEYVVTVTAERGRAVSYPASVRANTEEREEESPPRPSLSQPPRRPWGNLTAELSRFRGTVQDLERHLRAHGYPLRANQTYTSVARHIHEYLQRQVLGSSADGALLVSLDGLRGQFERVVLRWRPQPPAEGPGGELTVPGTTRTVSLPDLRPGTTYHVEVHGVRAGQTSKSYAFITTTGPSTTQGAQAPLLQQRPQELGELRVLGRDETGRLRVVWTAQPDTFAYFQLRMRVPEGPGAHEEVLPGDVRQALVPPPPPGTPYELSLHGVPPGGKPSDPIIYQGIMDKDEEKPGKSSGPPRLGELTVTDRTSDSLLLRWTVPEGEFDSFVIQYKDRDGQPQVVPVEGPQRSAVITSLDPGRKYKFVLYGFVGKKRHGPLVAEAKILPQSDPSPGTPPHLGNLWVTDPTPDSLHLSWTVPEGQFDTFMVQYRDRDGRPQVVPVEGPERSFVVSSLDPDHKYRFTLFGIANKKRYGPLTADGTTAPERKEEPPRPEFLEQPLLGELTVTGVTPDSLRLSWTVAQGPFDSFMVQYKDAQGQPQAVPVAGDENEVTVPGLDPDRKYKMNLYGLRGRQRVGPESVVAKTAPQEDVDETPSPTELGTEAPESPEEPLLGELTVTGSSPDSLSLFWTVPQGSFDSFTVQYKDRDGRPRAVRVGGKESEVTVGGLEPGHKYKMHLYGLHEGQRVGPVSAVGVTAPQQEETPPATESPLEPRLGELTVTDVTPNSVGLSWTVPEGQFDSFIVQYKDKDGQPQVVPVAADQREVTVYNLEPERKYKMNMYGLHDGQRMGPLSVVIVTAPATEASKPPLEPRLGELTVTDITPDSVGLSWTVPEGEFDSFVVQYKDRDGQPQVVPVAADQREVTIPDLEPSRKYKFLLFGIQDGKRRSPVSVEAKTVARGDASPGAPPRLGELWVTDPTPDSLRLSWTVPEGQFDSFVVQFKDKDGPQVVPVEGHERSVTVTPLDAGRKYRFLLYGLLGKKRHGPLTADGTTEARSAMDDTGTKRPPKPRLGEELQVTTVTQNSVGLSWTVPEGQFDSFVVQYKDRDGQPQVVPVEGSLREVSVPGLDPAHRYKLLLYGLHHGKRVGPISAVAITAGREETETETTAPTPPAPEPHLGELTVEEATSHTLHLSWMVTEGEFDSFEIQYTDRDGQLQMVRIGGDRNDITLSGLESDHRYLVTLYGFSDGKHVGPVHVEALTVPEEEKPSEPPTATPEPPIKPRLGELTVTDATPDSLSLSWTVPEGQFDHFLVQYRNGDGQPKAVRVPGHEEGVTISGLEPDHKYKMNLYGFHGGQRMGPVSVVGVTEPSMEAPEPAEEPLLGELTVTGSSPDSLSLSWTVPQGRFDSFTVQYKDRDGRPQVVRVGGEESEVTVGGLEPGRKYKMHLYGLHEGRRVGPVSAVGVTAPEEESPDAPLAKLRLGQMTVRDITSDSLSLSWTVPEGQFDHFLVQFKNGDGQPKAVRVPGHEDGVTISGLEPDHKYKMNLYGFHGGQRVGPVSAVGLTASTEPPTPEPPIKPRLEELTVTDATPDSLSLSWTVPEGQFDHFLVQYKNGDGQPKATRVPGHEDRVTISGLEPDNKYKMNLYGFHGGQRVGPVSAIGVTEEETPSPTEPSMEAPEPPEEPLLGELTVTGSSPDSLSLSWTVPQGRFDSFTVQYKDRDGRPQVVRVGGEESEVTVGGLEPGRKYKMHLYGLHEGRRVGPVSTVGVTAPQEDVDETPSPTEPGTEAPEPPEEPLLGELTVTGSSPDSLSLSWTVPQGRFDSFTVQYKDRDGRPQAVRVGGQESKVTVRGLEPGRKYKMHLYGLHEGRRLGPVSAVGVTEDEAETTQAVPTMTPEPPIKPRLGELTMTDATPDSLSLSWTVPEGQFDHFLVQYRNGDGQPKAVRVPGHEDGVTISGLEPDHKYKMNLYGFHGGQRVGPISVIGVTEEETPSPTELSTEAREPPEEPLLGELTVTGSSPDSLSLSWTIPQGHFDSFTVQYKDRDGRPQVMRVRGEESEVTVGGLEPGRKYKMHLYGLHEGRRVGPVSTVGVTVPTTTPEPPNKPRLGELTVTDATPDSLSLSWMVPEGQFDHFLVQYRNGDGQPKVVRVPGHEDGVTISGLEPDHKYKMNLYGFHGGQRVGPISVIGVTEEETPAPTEPSTEAPEPPEEPLLGELTVTGSSPDSLSLSWTIPQGRFDSFTVQYKDRDGRPQVVRVRGEESEVTVGGLEPGCKYKMHLYGLHEGQRVGPVSAVGVTAPKDEAETTQAVPTMTPEPPIKPRLGELTVTDATPDSLSLSWMVPEGQFDHFLVQYRNGDGQPKAVRVPGHEDGVTISGLEPDHKYKMNLYGFHGGQRVGPVSAIGVTEEETPSPTEPSTEAPEAPEEPLLGELTVTGSSPDSLSLSWTVPQGRFDSFTVQYKDRDGQPQVVRVRGEESEVTVGGLEPGRKYKMHLYGLHEGQRVGPVSTVGITAPLPTPLPVEPRLGELAVAAVTSDSVGLSWTVAQGPFDSFLVQYRDAQGQPQAVPVSGDLRAVAVSGLDPARKYKFLLFGLQNGKRHGPVPVEARTAPDTKPSPRLGELTVTDATPDSVGLSWTVPEGEFDSFVVQYKDKDGRLQVVPVAANQREVTVQGLEPSRKYRFLLYGLSGRKRLGPISADSTTAPLEKELPPHLGELTVAEETSSSLRLSWTVAQGPFDSFVVQYRDTDGQPRAVPVAADQRTVTVEDLEPGKKYKFLLYGLLGGKRLGPVSALGMTAPEEDTPAPELAPEAPEPPEEPRLGVLTVTDTTPDSMRLSWSVAQGPFDSFVVQYEDTNGQPQALLVDGDQSKILISGLEPSTPYRFLLYGLHEGKRLGPLSAEGTTGLAPAGQTSEESRPRLSQLSVTDVTTSSLRLNWEAPPGAFDSFLLRFGVPSPSTLEPHPRPLLQRELMVPGTRHSAVLRDLRSGTLYSLTLYGLRGPHKADSIQGTARTLSPVLESPRDLQFSEIRETSAKVNWMPPPSRADSFKVSYQLADGGEPQSVQVDGQARTQKLQGLIPGARYEVTVVSVRGFEESEPLTGFLTTVPDGPTQLRALNLTEGFAVLHWKPPQNPVDTYDVQVTAPGAPPLQAETPGSAVDYPLHDLVLHTNYTATVRGLRGPNLTSPASITFTTGLEAPRDLEAKEVTPRTALLTWTEPPVRPAGYLLSFHTPGGQNQEILLPGGITSHQLLGLFPSTSYNARLQAMWGQSLLPPVSTSFTTGGLRIPFPRDCGEEMQNGAGASRTSTIFLNGNRERPLNVFCDMETDGGGWLVFQRRMDGQTDFWRDWEDYAHGFGNISGEFWLGNEALHSLTQAGDYSMRVDLRAGDEAVFAQYDSFHVDSAAEYYRLHLEGYHGTAGDSMSYHSGSVFSARDRDPNSLLISCAVSYRGAWWYRNCHYANLNGLYGSTVDHQGVSWYHWKGFEFSVPFTEMKLRPRNFRSPAGGG

SEQ ID NO: 148 - protein, 1798 aa, Homo sapiens
MELTSRERGRGQPLPWELRLGLLLSVLAATLAQAPAPDVPGCSRGSCYPATGDLLVGRADRLTASSTCGLNGPQPYCIVSHLQDEKKCFLCDSRRPFSARDNPHSHRIQNVVTSFAPQRRAAWWQSENGIPAVTIQLDLEAEFHFTHLIMTFKTFRPAAMLVERSADFGRTWHVYRYFSYDCGADFPGVPLAPPRHWDDVVCESRYSEIEPSTEGEVIYRVLDPAIPIPDPYSSRIQNLLKITNLRVNLTRLHTLGDNLLDPRREIREKYYYALYELVVRGNCFCYGHASECAPAPGAPAHAEGMVHGACICKHNTRGLNCEQCQDFYRDLPWRPAEDGHSHACRKCECHGHTHSCHFDMAVYLASGNVSGGVCDGCQHNTAGRHCELCRPFFYRDPTKDLRDPAVCRSCDCDPMGSQDGGRCDSHDDPALGLVSGQCRCKEHVVGTRCQQCRDGFFGLSISDRLGCRRCQCNARGTVPGSTPCDPNSGSCYCKRLVTGRGCDRCLPGHWGLSHDLLGCRPCDCDVGGALDPQCDEGTGQCHCRQHMVGRRCEQVQPGYFRPFLDHLIWEAEDTRGQVLDVVERLVTPGETPSWTGSGFVRLQEGQTLEFLVASVPKAMDYDLLLRLEPQVPEQWAELELIVQRPGPVPAHSLCGHLVPKDDRIQGTLQPHARYLIFPNPVCLEPGISYKLHLKLVRTGGSAQPETPYSGPGLLIDSLVLLPRVLVLEMFSGGDAAALERQATFERYQCHEEGLVPSKTSPSEACAPLLISLSTLIYNGALPCQCNPQGSLSSECNPHGGQCLCKPGVVGRRCDLCAPGYYGFGPTGCQACQCSHEGALSSLCEKTSGQCLCRTGAFGLRCDRCQRGQWGFPSCRPCVCNGHADECNTHTGACLGCRDHTGGEHCERCIAGFHGDPRLPYGGQCRPCPCPEGPGSQRHFATSCHQDEYSQQIVCHCRAGYTGLRCEACAPGHFGDPSRPGGRCQLCECSGNIDPMDPDACDPHTGQCLRCLHHTEGPHCAHCKPGFHGQAARQSCHRCTCNLLGTNPQQCPSPDQCHCDPSSGQCPCLPNVQGPSCDRCAPNFWNLTSGHGCQPCACHPSRARGPTCNEFTGQCHCRAGFGGRTCSECQELHWGDPGLQCHACDCDSRGIDTPQCHRFTGHCSCRPGVSGVRCDQCARGFSGIFPACHPCHACFGDWDRVVQDLAARTQRLEQRAQELQQTGVLGAFESSFWHMQEKLGIVQGIVGARNTSAASTAQLVEATEELRREIGEATEHLTQLEADLTDVQDENFNANHALSGLERDRLALNLTLRQLDQHLDLLKHSNFLGAYDSIRHAHSQSAEAERRANTSALAVPSPVSNSASARHRTEALMDAQKEDFNSKHMANQRALGKLSAHTHTLSLTDINELVCGAPGDAPCATSPCGGAGCRDEDGQPRCGGLSCNGAAATADLALGRARHTQAELQRALAEGGSILSRVAETRRQASEAQQRAQAALDKANASRGQVEQANQELQELIQSVKDFLNQEGADPDSIEMVATRVLELSIPASAEQIQHLAGAIAERVRSLADVDAILARTVGDVRRAEQLLQDARRARSWAEDEKQKAETVQAALEEAQRAQGIAQGAIRGAVADTRDTEQTLYQVQERMAGAERALSSAGERARQLDALLEALKLKRAGNSLAASTAEETAGSAQGRAQEAEQLLRGPLGDQYQTVKALAERKAQGVLAAQARAEQLRDEARDLLQAAQDKLQRLQELEGTYEENERALESKAAQLDGLEARMRSVLQAINLQVQIYNTCQ

SEQ ID NO: 149 - protein, 1609 aa, Homo sapiens [sequence omitted]

SEQ ID NO: 150 - protein, 1821 aa, Homo sapiens
MRPRTKARSPGRALRNPWRGFLPLTLALFVGAGHAQRDPVGRYEPAGGDANRLRRPGGSYPAAAAAKVYSLFREQDAPVAGLQPVERAQPGWGSPRRPTEAEARRPSRAQQSRRVQPPAQTRRSTPLGQQQPAPRTRAAPALPRLGTPQRSGAAPPTPPRGRLTGRNVCGGQCCPGWTTANSTNHCIKPVCEPPCQNRGSCSRPQLCVCRSGFRGARCEEVIPDEEFDPQNSRLAPRRWAERSPNLRRSSAAGEGTLARAQPPAPQSPPAPQSPPAGTLSGLSQTHPSQQHVGLSRTVRLHPTATASSQLSSNALPPGPGLEQRDGTQQAVPLEHPSSPWGLNLTEKIKKIKIVFTPTICKQTCARGHCANSCERGDTTTLYSQGGHGHDPKSGFRIYFCQIPCLNGGRCIGRDECWCPANSTGKFCHLPIPQPDREPPGRGSRPRALLEAPLKQSTFTLPLSNQLASVNPSLVKVHIHHPPEASVQIHQVAQVRGGVEEALVENSVETRPPPWLPASPGHSLWDSNNIPARSGEPPRPLPPAAPRPRGLLGRCYLNTVNGQCANPLLELTTQEDCCGSVGAFWGVTLCAPCPPRPASPVIENGQLECPQGYKRLNLTHCQDINECLTLGLCKDAECVNTRGSYLCTCRPGLMLDPSRSRCVSDKAISMLQGLCYRSLGPGTCTLPLAQRITKQICCCSRVGKAWGSECEKCPLPGTEAFREICPAGHGYTYASSDIRLSMRKAEEEELARPPREQGQRSSGALPGPAERQPLRVVTDTWLEAGTIPDKGDSQAGQVTTSVTHAPAWVTGNATTPPMPEQGIAEIQEEQVTPSTDVLVTLSTPGIDRCAAGATNVCGPGTCVNLPDGYRCVCSPGYQLHPSQAYCTDDNECLRDPCKGKGRCINRVGSYSCFCYPGYTLATSGATQECQDINECEQPGVCSGGQCTNTEGSYHCECDQGYIMVRKGHCQDINECRHPGTCPDGRCVNSPGSYTCLACEEGYRGQSGSCVDVNECLTPGVCAHGKCTNLEGSFRCSCEQGYEVTSDEKGCQDVDECASRASCPTGLCLNTEGSFACSACENGYWVNEDGTACEDLDECAFPGVCPSGVCTNTAGSFSCKDCDGGYRPSPLGDSCEDVDECEDPQSSCLGGECKNTVGSYQCLCPQGFQLANGTVCEDVNECMGEEHCAPHGECLNSHGSFFCLCAPGFVSAEGGTSCQDVDECATTDPCVGGHCVNTEGSFNCLCETGFQPSPESGECVDIDECEDYGDPVCGTWKCENSPGSYRCVLGCQPGFHMAPNGDCIDIDECANDTMCGSHGFCDNTDGSFRCLCDQGFEISPSGWDCVDVNECELMLAVCGAALCENVEGSFLCLCASDLEEYDAQEGHCRPRGAGGQSMSEAPTGDHAPAPTRMDCYSGQKGHAPCSSVLGRNTTQAECCCTQGATWGDACDLCPSEDSAEFSEICPSGKGYIPVEGAWTFGQTMYTDADECVIFGPGLCPNGRCLNTVPGYVCLCNPGFHYDASHKKCEDHDECQDLACENGECVNTEGSFHCFCSPPLTLDLSQQRCMNSTSSTEDLPDHDIHMDICWKKVTNDVCSEPLRGHRTTYTECCCQDGKAWSQQCALCPPRSSEVYAQLCNVARIEAEREAGVHFRPGYEYGPGPDDLHYSIYGPDGAPFYNYLGPEDTVPEPAFPNTAGHSADRTPILESPLQPSELQPHYVASHPEPPAGFEGLQAEECGILNGCENGRCVRVREGYTCDCFEGFQLDAAHMACVDVNECDDLNGPAVLCVHGYCENTEGSYRCHCSPGYVAEAGPPHCTAKE

SEQ ID NO: 151 - protein, 433 aa, Homo sapiens
MVWKVAVFLSVALGIGAVPIDDPEDGGKHWVVIVAGSNGWYNYRHQADACHAYQIIHRNGIPDEQIVVMMYDDIAYSEDNPTPGIVINRPNGTDVYQGVPKDYTGEDVTPQNFLAVLRGDAEAVKGIGSGKVLKSGPQDHVFIYFTDHGSTGILVFPNEDLHVKDLNETIHYMYKHKMYRKMVFYIEACESGSMMNHLPDNINVYATTAANPRESSYACYYDEKRSTYLGDWYSVNWMEDSDVEDLTKETLHKQYHLVKSHTNTSHVMQYGNKTISTMKVMQFQGMKRKASSPVPLPPVTHLDLTPSPDVPLTIMKRKLMNTNDLEESRQLTEEIQRHLDARHLIEKSVRKIVSLLAASEAEVEQLLSERAPLTGHSCYPEALLHFRTHCFNWHSPTYEYALRHLYVLVNLCEKPYPLHRIKLSMDHVCLGHY

SEQ ID NO: 152 - protein, 334 aa, Homo sapiens
MATLKEKLIAPVAEEEATVPNNKITVVGVGQVGMACAISILGKSLADELALVDVLEDKLKGEMMDLQHGSLFLQTPKIVADKDYSVTANSKIVVVTAGVRQQEGESRLNLVQRNVNVFKFIIPQIVKYSPDCIIIVVSNPVDILTYVTWKLSGLPKHRVIGSGCNLDSARFRYLMAEKLGIHPSSCHGWILGEHGDSSVAVWSGVNVAGVSLQELNPEMGTDNDSENWKEVHKMVVESAYEVIKLKGYTNWAIGLSVADLIESMLKNLSRIHPVSTMVKGMYGIENEVFLSLPCILNARGLTSVINQKLKDDEVAQLKKSADTLWDIQKDLKDL

SEQ ID NO: 153 - protein, 480 aa, Homo sapiens
MIRAAPPPLFLLLLLLLLLVSWASRGEAAPDQDEIQRLPGLAKQPSFRQYSGYLKGSGSKHLHYWFVESQKDPENSPVVLWLNGGPGCSSLDGLLTEHGPFLVQPDGVTLEYNPYSWNLIANVLYLESPAGVGFSYSDDKFYATNDTEVAQSNFEALQDFFRLFPEYKNNKLFLTGESYAGIYIPTLAVLVMQDPSMNLQGLAVGNGLSSYEQNDNSLVYFAYYHGLLGNRLWSSLQTHCCSQNKCNFYDNKDLECVTNLQEVARIVGNSGLNIYNLYAPCAGGVPSHFRYEKDTVVVQDLGNIFTRLPLKRMWHQALLRSGDKVRMDPPCTNTTAASTYLNNPYVRKALNIPEQLPQWDMCNFLVNLQYRRLYRSMNSQYLKLLSSQKYQILLYNGDVDMACNFMGDEWFVDSLNQKMEVQRRPWLVKYGDSGEQIAGFVKEFSHIAFLTIKGAGHMVPTDKPLAAFTMFSRFLNKQPY

SEQ ID NO: 154 - protein, 334 aa, Homo sapiens
MSEPIRVLVTGAAGQIAYSLLYSIGNGSVFGKDQPIILVLLDITPMMGVLDGVLMELQDCALPLLKDVIATDKEDVAFKDLDVAILVGSMPRREGMERKDLLKANVKIFKSQGAALDKYAKKSVKVIVVGNPANTNCLTASKSAPSIPKENFSCLTRLDHNRAKAQIALKLGVTANDVKNVIIWGNHSSTQYPDVNHAKVKLQGKEVGVYEALKDDSWLKGEFVTTVQQRGAAVIKARKLSSAMSAAKAICDHVRDIWFGTPEGEFVSMGVISDGNSYGVPDDLLYSFPVVIKNKTWKFVEGLPINDFSREKMDLTAKELTEEKESAFEFLSSA

SEQ ID NO: 155 - protein, 552 aa, Homo sapiens
MRLLPLAPGRLRRGSPRHLPSCSPALLLLVLGGCLGVFGVAAGTRRPNVVLLLTDDQDEVLGGMTPLKKTKALIGEMGMTFSSAYVPSALCCPSRASILTGKYPHNHHVVNNTLEGNCSSKSWQKIQEPNTFPAILRSMCGYQTFFAGKYLNEYGAPDAGGLEHVPLGWSYWYALEKNSKYYNYTLSINGKARKHGENYSVDYLTDVLANVSLDFLDYKSNFEPFFMMIATPAPHSPWTAAPQYQKAFQNVFAPRNKNFNIHGTNKHWLIRQAKTPMTNSSIQFLDNAFRKRWQTLLSVDDLVEKLVKRLEFTGELNNTYIFYTSDNGYHTGQFSLPIDKRQLYEFDIKVPLLVRGPGIKPNQTSKMLVANIDLGPTILDIAGYDLNKTQMDGMSLLPILRGASNLTWRSDVLVEYQGEGRNVTDPTCPSLSPGVSQCFPDCVCEDAYNNTYACVRTMSALWNLQYCEFDDQEVFVEVYNLTADPDQITNIAKTIDPELLGKMNYRLMMLQSCSGPTCRTPGVFDPGYRFDPRLMFSNRGSVRTRRFSKHLL

SEQ ID NO: 156 - protein, 1321 aa, Homo sapiens
MGAPFVWALGLLMLQMLLFVAGEQGTQDITDASERGLHMQKLGSGSVQAALAELVALPCLFTLQPRPSAARDAPRIKWTKVRTASGQRQDLPILVAKDNVVRVAKSWQGRVSLPSYPRRRANATLLLGPLRASDSGLYRCQVVRGIEDEQDLVPLEVTGVVFHYRSARDRYALTFAEAQEACRLSSAIIAAPRHLQAAFEDGFDNCDAGWLSDRTVRYPITQSRPGCYGDRSSLPGVRSYGRRNPQELYDVYCFARELGGEVFYVGPARRLTLAGARAQCRRQGAALASVGQLHLAWHEGLDQCDPGWLADGSVRYPIQTPRRRCGGPAPGVRTVYRFANRTGFPSPAERFDAYCFRAHHPTSQHGDLETPSSGDEGEILSAEGPPVRELEPTLEEEEVVTPDFQEPLVSSGEEETLILEEKQESQQTLSPTPGDPMLASWPTGEVWLSTVAPSPSDMGAGTAASSHTEVAPTDPMPRRRGRFKGLNGRYFQQQEPEPGLQGGMEASAQPPTSEAAVNQMEPPLAMAVTEMLGSGQSRSPWADLTNEVDMPGAGSAGGKSSPEPWLWPPTMVPPSISGHSRAPVLELEKAEGPSARPATPDLFWSPLEATVSAPSPAPWEAFPVATSPDLPMMAMLRGPKEWMLPHPTPISTEANRVEAHGEATATAPPSPAAETKVYSLPLSLTPTGQGGEAMPTTPESPRADFRETGETSPAQVNKAEHSSSSPWPSVNRNVAVGFVPTETATEPTGLRGIPGSESGVFDTAESPTSGLQATVDEVQDPWPSVYSKGLDASSPSAPLGSPGVFLVPKVTPNLEPWVATDEGPTVNPMDSTVTPAPSDASGIWEPGSQVFEEAESTTLSPQVALDTSIVTPLTTLEQGDKVGVPAMSTLGSSSSQPHPEPEDQVETQGTSGASVPPHQSSPLGKPAVPPGTPTAASVGESASVSSGEPTVPWDPSSTLLPVTLGIEDFELEVLAGSPGVESFWEEVASGEEPALPGTPMNAGAEEVHSDPCENNPCLHGGTCNANGTMYGCSCDQGFAGENCEIDIDDCLCSPCENGGTCIDEVNGFVCLCLPSYGGSFCEKDTEGCDRGWHKFQGHCYRYFAHRRAWEDAEKDCRRRSGHLTSVHSPEEHSFINSFGHENTWIGLNDRIVERDFQWTDNTGLQFENWRENQPDNFFAGGEDCVVMVAHESGRWNDVPCNYNLPYVCKKGTVLCGPPPAVENASLIGARKAKYNVHATVRYQCNEGFAQHHVATIRCRSNGKWDRPQIVCTKPRRSHRMRRHHHHHQHHHQHHHHKSRKERRKHKKHPTEDWEKDEGNFC

SEQ ID NO: 157 - protein, 431 aa, Homo sapiens
MLALLAASVALAVAAGAQDSPAPGSRFVCTALPPEAVHAGCPLPAMPMQGGAQSPEEELRAAVLQLRETVVQQKETLGAQREAIRELTGKLARCEGLAGGKARGAGATGKDTMGDLPRDPGHVVEQLSRSLQTLKDRLESLEHQLRANVSNAGLPGDFREVLQQRLGELERQLLRKVAELEDEKSLLHNETSAHRQKTESTLNALLQRVTELERGNSAFKSPDAFKVSLPLRTNYLYGKIKKTLPELYAFTICLWLRSSASPGIGTPFSYAVPGQANEIVLIEWGNNPIELLINDKVAQLPLFVSDGKWHHICVTWTTRDGMWEAFQDGEKLGTGENLAPWHPIKPGGVLILGQEQDTVGGRFDATQAFVGELSQFNIWDRVLRAQEIVNIANCSTNMPGNIIPWVDNNVDVFGGASKWPVETCEERLLDL

SEQ ID NO: 158 - protein, 440 aa, Homo sapiens
MEYQILKMSLCLFILLFLTPGILCICPLQCICTERHRHVDCSGRNLSTLPSGLQENIIHLNLSYNHFTDLHNQLTQYTNLRTLDISNNRLESLPAHLPRSLWNMSAANNNIKLLDKSDTAYQWNLKYLDVSKNMLEKVVLIKNTLRSLEVLNLSSNKLWTVPTNMPSKLHIVDLSNNSLTQILPGTLINLTNLTHLYLHNNKFTFIPDQSFDQLFQLQEITLYNNRWSCDHKQNITYLLKWMMETKAHVIGTPCSTQISSLKEHNMYPTPSGFTSSLFTVSGMQTVDTINSLSVVTQPKVTKIPKQYRTKETTFGATLSKDTTFTSTDKAFVPYPEDTSTETINSHEAAAATLTIHLQDGMVTNTSLTSSTKSSPTPMTLSITSGMPNNFSEMPQQSTTLNLWREETTTNVKTPLPSVANAWKVNASFLLLLNVVVMLAV

SEQ ID NO: 159 - protein, 114 aa, Homo sapiens
MTCKMSQLERNIETIINTFHQYSVKLGHPDTLNQGEFKELVRKDLQNFLKKENKNEKVIEHIMEDLDTNADKQLSFEEFIMLMARLTWASHEKMHEGDEGPGHHHKPGLGEGTP

SEQ ID NO: 160 - protein, 229 aa, Homo sapiens
MDCRVHMRPIGLTWVLQLTLAWILLEACGGSRPLQARSQQHHGLAADLGKGKLHLAGPCCPSEMDTTETSGPGNHPERCGVPSPECESFLEHLQRALRSRFRLRLLGVRQAQPLCEELCQAWFANCEDDITCGPTWLPLSEKRGCEPSCLTYGQTFADGTDLCRSALGHALPVAAPGARHCFNISISAVPRPRPGRRGREAPSRRSRSPRTSILDAAGSGSGSGSGSGP

SEQ ID NO: 161 - protein, 163 aa, Homo sapiens
MRRLLIPLALWLGAVGVGVAELTEAQRRGLQVALEEFHKHPPVQWAFQETSVESAVDTPFPAGIFVRLEFKLQQTSCRKRDWKKPECKVRPNGRKRKCLACIKLGSEDKVLGRLVHCPIETQVLREAEEHQETQCLRVQRAGEDPHSFYFPGQFAFSKALPRS

SEQ ID NO: 162 - protein, 295 aa, Homo sapiens
MLQGPGSLLLLFLASHCCLGSARGLFLFGQPDFSYKRSNCKPIPANLQLCHGIEYQNMRLPNLLGHETMKEVLEQAGAWIPLVMKQCHPDTKKFLCSLFAPVCLDDLDETIQPCHSLCVQVKDRCAPVMSAFGFPWPDMLECDRFPQDNDLCIPLASSDHLLPATEEAPKVCEACKNKNDDDNDIMETLCKNDFALKIKVKEITYINRDTKIILETKSKTIYKLNGVSERDLKKSVLWLKDSLQCTCEEMNDINAPYLVMGQKQGGELVITSVKRWQKGQREFKRISRSIRKLQC

SEQ ID NO: 163 - protein, 325 aa, Homo sapiens
MVCGSPGGMLLLRAGLLALAALCLLRVPGARAAACEPVRIPLCKSLPWNMTKMPNHLHHSTQANAILAIEQFEGLLGTHCSPDLLFFLCAMYAPICTIDFQHEPIKPCKSVCERARQGCEPILIKYRHSWPENLACEELPVYDRGVCISPEAIVTADGADFPMDSSNGNCRGASSERCKCKPIRATQKTYFRNNYNYVIRAKVKEIKTKCHDVTAVVEVKEILKSSLVNIPRDTVNLYTSSGCLCPPLNVNEEYIIMGYEDEERSRLLLVEGSIAEKWKDRLGKKVKRWDMKLRHLGLSKSDSSNSDSTQSQKSGRNSNPRQARN

SEQ ID NO: 164 - protein, 155 aa, Homo sapiens
MALKAEKEAPATPKAKAKALKAKKAVLKGVHSHKKQKIYMSPTFQWPKTLRLQRQPKDPRKSTPRRNELDHYAVIKFLLTTEPAMKKIEDNNNMLVFIKDVKANKHQIKQAVKKLYNIDVAQFNTLIRPDGEKKAYVQPSPDYDALDVANKIGII

SEQ ID NO: 165 - protein, 1168 aa, Homo sapiens
MEPITFTARKHLLSNEVSVDFGLQLVGSLPVHSLTTMPMLPWVVAEVRRLSRQSTRKEPVTKQVRLCVSPSGLRCEPEPGRSQQWDPLIYSSIFECKPQRVHKLIHNSHDPSYFACLIKEDAVHRQSICYVFKADDQTKVPEIISSIRQAGKIARQEELHCPSEFDDTFSKKFEVLFCGRVTVAHKKAPPALIDECIEKFNHVSGSRGSESPRPNPPHAAPTGSQEPVRRPMRKSFSQPGLRSLAFRKELQDGGLRSSGFFSSFEESDIENHLISGHNIVQPTDIEENRTMLFTIGQSEVYLISPDTKKIALEKNFKEISFCSQGIRHVDHFGFICRESSGGGGFHFVCYVFQCTNEALVDEIMMTLKQAFTVAAVQQTAKAPAQLCEGCPLQSLHKLCERIEGMNSSKTKLELQKHLTTLTNQEQATIFEEVQKLRPRNEQRENELIISFLRCLYEEKQKEHIHIGEMKQTSQMAAENIGSELPPSATRFRLDMLKNKAKRSLTESLESILSRGNKARGLQEHSISVDLDSSLSSTLSNTSKEPSVCEKEALPISESSFKLLGSSEDLSSDSESHLPEEPAPLSPQQAFRRRANTLSHFPIECQEPPQPARGSPGVSQRKLMRYHSVSTETPHERKDFESKANHLGDSGGTPVKTRRHSWRQQIFLRVATPQKACDSSSRYEDYSELGELPPRSPLEPVCEDGPFGPPPEEKKRTSRELRELWQKAILQQILLLRMEKENQKLQASENDLLNKRLKLDYEEITPCLKEVTTVWEKMLSTPGRSKIKFDMEKMHSAVGQGVPRHHRGEIWKFLAEQFHLKHQFPSKQQPKDVPYKELLKQLTSQQHAILIDLGRTFPTHPYFSAQLGAGQLSLYNILKAYSLLDQEVGYCQGLSFVAGILLLHMSEEEAFKMLKFLMFDMGLRKQYRPDMIILQIQMYQLSRLLHDYHRDLYNHLEEHEIGPSLYAAPWFLTMFASQFPLGFVARVFDMIFLQGTEVIFKVALSLLGSHKPLILQHENLETIVDFIKSTLPNLGLVQMEKTINQVFEMDIAKQLQAYEVEYHVLQEELIDSSPLSDNQRMDKLEKTNSSLRKQNLDLLEQLQVANGRIQSLEATIEKLLSSESKLKQAMLTLELERSALLQTVEELRRRSAEPSDREPECTQPEPTGD

SEQ ID NO: 166 - protein, 439 aa, Homo sapiens
MPAIAVLAAAAAAWCFLQVESRHLDALAGGAGPNHGNFLDNDQWLSTVSQYDRDKYWNRFRDDDYFRNWNPNKPFDQALDPSKDPCLKVKCSPHKVCVTQDYQTALCVSRKHLLPRQKKGNVAQKHWVGPSNLVKCKPCPVAQSAMVCGSDGHSYTSKCKLEFHACSTGKSLATLCDGPCPCLPEPEPPKHKAERSACTDKELRNLASRLKDWFGALHEDANRVIKPTSSNTAQGRFDTSILPICKDSLGWMFNKLDMNYDLLLDPSEINAIYLDKYEPCIKPLFNSCDSFKDGKLSNNEWCYCFQKPGGLPCQNEMNRIQKLSKGKSLLGAFIPRCNEEGYYKATQCHGSTGQCWCVDKYGNELAGSRKQGAVSCEEEQETSGDFGSGGSVVLLDDLEYERELGPKDKEGKLRVHTRAVTEDDEDEDDDKEDEVGYIW

SEQ ID NO: 167 - protein, 1023 aa, Homo sapiens
MCARMAGRTTAAPRGPYGPWLCLLVALALDVVRVDCGQAPLDPVYLPAALELLDAPEHFRVQQVGHYPPANSSLSSRSETFLLLQPWPRAQPLLRASYPPFATQQVVPPRVTEPHQRPVPWDVRAVSVEAAVTPAEPYARVLFHLKGQDWPPGSGSLPCARLHATHPAGTAHQACRFQPSLGACVVELELPSHWFSQASTTRAELAYTLEPAAEGPGGCGSGEENDPGEQALPVGGVELRPADPPQYQEVPLDEAVTLRVPDMPVRPGQLFSATLLLRHNFTASLLTLRIKVKKGLHVTAARPAQPTLWTAKLDRFKGSRHHTTLITCHRAGLTEPDSSPLELSEFLWVDFVVENSTGGGVAVTRPVTWQLEYPGQAPEAEKDKMVWEILVSERDIRALIPLAKAEELVNTAPLTGVPQHVPVRLVTVDGGGALVEVTEHVGCESANTQVLQVSEACDAVFVAGKESRGARGVRVDFWWRRLRASLRLTVWAPLLPLRIELTDTTLEQVRGWRVPGPAEGPAEPAAEASDEAERRARGCHLQYQRAGVRFLAPFAAHPLDGGRRLTHLLGPDWLLDVSHLVAPHARVLDSRVASLEGGRVVVGREPGVTSIEVRSPLSDSILGEQALAVTDDKVSVLELRVQPVMGISLTLSRGTAHPGEVTATCWAQSALPAPKQEVALSLWLSFSDHTVAPAELYDRRDLGLSVSAEEPGAILPAEEQGAQLGVVVSGAGAEGLPLHVALHPPEPCRRGRHRVPLASGTAWLGLPPASTPAPALPSSPAWSPPATEATMGGKRQVAGSVGGNTGVRGKFERAEEEARKEETEAREEEEEEEEEMVPAPQHVTELELGMYALLGVFCVAIFIFLVNGVVFVLRYQRKEPPDSATDPTSPQPHNWVWLGTDQEELSRQLDRQSPGPPKGEGSCPCESGGGGEAPTLAPGPPGGTTSSSSTLARKEAGGRRKRVEFVTFAPAPPAQSPEEPVGAPAVQSILVAGEEDIRWVCEDMGLKDPEELRNYMERIRGSS

SEQ ID NO: 168 - protein, 752 aa, Homo sapiens
MAEPQAESEPLLGGARGGGGDWPAGLTTYRSIQVGPGAAARWDLCIDQAVVFIEDAIQYRSINHRVDASSMWLYRRYYSNVCQRTLSFTIFLILFLAFIETPSSLTSTADVRYRAAPWEPPCGLTESVEVLCLLVFAADLSVKGYLFGWAHFQKNLWLLGYLVVLVVSLVDWTVSLSLVCHEPLRIRRLLRPFFLLQNSSMMKKTLKCIRWSLPEMASVGLLLAIHLCLFTMFGMLLFAGGKQDDGQDRERLTYFQNLPESLTSLLVLLTTANNPDVMIPAYSKNRAYAIFFIVFTVIGSLFLMNLLTAIIYSQFRGYLMKSLQTSLFRRRLGTRAAFEVLSSMVGEGGAFPQAVGVKPQNLLQVLQKVQLDSSHKQAMMEKVRSYGSVLLSAEEFQKLFNELDRSVVKEHPPRPEYQSPFLQSAQFLFGHYYFDYLGNLIALANLVSICVFLVLDADVLPAERDDFILGILNCVFIVYYLLEMLLKVFALGLRGYLSYPSNVFDGLLTVVLLVLEISTLAVYRLPHPGWRPEMVGLLSLWDMTRMLNMLIVFRFLRIIPSMKLMAVVASTVLGLVQNMRAFGGILVVVYYVFAIIGINLFRGVIVALPGNSSLAPANGSAPCGSFEQLEYWANNFDDFAAALVTLWNLMVVNNWQVFLDAYRRYSGPWSKIYFVLWWLVSSVIWVNLFLALILENFLHKWDPRSHLQPLAGTPEATYQMTVELLFRDILEEPGEDELTERLSQHPHLWLCR

SEQ ID NO: 169 - protein, 115 aa, Homo sapiens
MAWTPLLLPLLTFCTVSEASYELTQPPSVSVSPGQTARITCSGDALPKKYAYWYQQKSGQAPVLVIYEDSKRPSGIPERFSGSSSGTMATLTISGAQVEDEADYYCYSTDSSGNH

SEQ ID NO: 170 - protein, 14 aa, Homo sapiens
LAAAVSNGFYDLYR

1. A method for diagnosing diabetic retinopathy or diabetes mellitus, comprising: contacting a molecule specifically binding to the protein as set forth in SEQ ID NO: 69 with a biological sample containing the protein as set forth in SEQ ID NO: 69 as a biomarker; and detecting the binding complex indicative of the diabetic retinopathy or the diabetes mellitus.

2. The method of claim 1, wherein the biological sample is a blood or urine sample.
